United States Patent Application Publication US 2007/0054278 A1 - sequence listing, part 26

SEQ ID NO: 94027 - DNA, 134341 bp, Homo sapiens
  misc_feature (1)...(134341): n = A,T,C or G
ttgccctggagaagctgctcctgagatcggaggcttcgtgggtcaagcttggccctgccctgggcagagataaacaggccctgaatacatttcccagattgcaacactggtgagtcaggcagggtcggacagctgttcctcacaggcaccccctggctatacctgataaggaagaccgtcactcattccagcacagggcacagggtggctgcgtgtgcaccacatataaacagacactcccagcctcagtgttgtcttagaggaaatgacagacattctgaatggcagaawacattggtgagcttagcaaactcacttctgctcaaggagggctccagtttcataagccaaaataagtaaaaccagggctgtcatttggctgtgctttgggactgctttttgaacctacctggtcaagggtgggctcagctctggaaagaaaaaggaaggattaaagtggagggatgaggaggaggtcagaagaggggaggtgggtttatgaaggaacaaatggcaaaatgcccagagaaaaaagatgtcttataaaaacatgaacataccttcaccgcaaagagagggaatcaatgccatggcatcttcaaaaacaggaaaaaaggccagcacagtggctcatgccattaatcccaacattttgggaggcggaggtgggaggatcacttgcttaagcccaggaatttaagagcagtctgggcaacacagcgagaccctgtctctacaaaaaattaaaaatgaaaaagtagccaagtgtggtggcatagcacatgtagtaccagctactcgggaggctggggcaggaggatcacttgagtctgggaggttgaggctgcagtgagctatgattgcattactgcattccagcctgggcgacagagcgagaccttgtctcaaaagaaaaaaaaaagaaatgctgggcgcggtggctcatgcctgtaatcccagcactttgggaggctgaggcaggcagattacctaacgtcaggagttagagagcagcctggccaacatggtgaaaccctgtctctactaaaaatacaaaaattagccaggcatggtggtggcgcacctgtaatcccagctactcaggaggctgaagctggagaattgcttgaatctaagaggcggagattgcagtgagcggagatcatgccattgcactccagcctgtgtgacaacagtgaatcttcgtctcagaaaagaaaagaaaagaaaagaaaaaaaatccccccaaaaatgaacagacagatcttgagaccaaaaaaaaaaaaaaaaagagagtggctactccttaaatgatatacatgagcaaaaaatggggcaaatggaggattgatattaataattatatggtagtaccaccatcacattataccttgtaatcaacacttcacattacctttatgaaagccatttatagtttacaaggagtttttacattaatcttttccatttactgcatcaacacatttgagtgggtaagacattgtgagctacattttacagatgagaaaactgaggctcaaagatacatgaaattaactgagatttaaaagctgggaaggggtaggtttgtcttaagtaacccagacctagatacataactaaagacacaataacttggctgggcatggtggcttatgcctgtaatcccagcactttgggaggctgaggcaggaggatcatttgaggtgaggagttcgagaccagcctgatcaacatggtgaaaccccgtttctactaaaaatacaaaaattagctgggcgtggtggcatgtgcctgtagtcccagctactagggaggctgaggcagaagaattgcttgaacccaggaggtgaaggttgcagtgagctgagatcgtgccgctgcactccagcctgagcgacagagtgagactttgtctcaaaaataaataaatgaataaaataaagacacaattttttttttgagacagagtcttgccgtcagggtggagtgcaatggcgtgatctccactcactgcaacctccacctcccaggttcaagttgggattacaggagtgcatcaccatgcctattttgtatttttagtagagacggggtttcaccatgttggccaggctggtcttgaactcctgacgtcaggtgatttacccacctcggcttcccaaagtgctgggattacaggcgtgagccaccgtgcccagccaaaaataacccttctttgttttttgagatggagtcttgctttgtcacccaggctggagtgcagtggcgcgatctcggctcactgcaacctccgcctcccgggttcacgccattctcctgcctcagcctcccgagtagctgggactacaggcggctgccaccacgcctggctaatttttttttgtatttttagtagagactgggtttcactgtgttaggcaggatggtctccatctcctgacctcatgatctgcccgccttggccttccgaagtgctgggattacagtcgtgagccaccacacccggcctaaaaaaaaaaaacccttctttaggatgattcctttattaaaaaaaatttttttttgtagaggtagggatcttgctatgttgcccagcctggtctcgaactcctggcttcaagagatcctcccatcttggcctcccaaagtgctgggattacaggtatgagccaccatacccagccggattctttttcagtgactgctcagagggctaactaaatcttcattgcatttttaagtagagcagcccgcattctccagtatcatctgcaactaatttctctaaacaaccttttgattattttttgcctagtaagcattggtgaagagtaaagcaccagggaaaatttctaggctctactccatgtccttgtttccgaagtgtcccttccttaacctgttctatcataacctaacctgtttctggactccacactctgggttccagaaacaacatctttgggtcctctaagcttgccactgttgctctcgggttggggggaaactttggagggcactcagaccttcccttatttgcataggacattatgggagcagttaactcaccttgagtagtcagacaggtattttcaaagtggtgatgcctgctagaatcttaaagtcagtggttctccaactttggcctgatcagaatcatctggggagcttgttaatgactaggatgtccaagccccaccccagaacttctgagtcagaattcccaggggtggggcctggccatctgtgagcttaacaagccccccaggtgattctgaagaacaccaaagtttgagaaccagttatagcactgtcttagagttaatcaggtgaaagacagtgggaagtcattttaggagaggaggtagcagtaacagaagtgcagagagcccaagaggagacactgtcaggaagacaaatctctgctctgtctttatctcccttgaacaaagtggtcaaataaaggaggttatagaaatctcttcgttcaggccgggtgcggtggctcacgcctgtaatcccagcactttgggatgccaaggagggcggatcacctgaggtcaggagttcgagaccagcctggccaacatggtgaaaccccgtctctatttaaaatacaaaaattggctgggcatggtggtgggcacctgcaatcccagctactctgaaggctggggcaggagaattgcttgaacccgggaggcggaggttgcagtgagctgagaccgggccattgcactccagcctgggggacaagagcgagactttgtctgaaaaaaaaaaaaaaagaaagaaatgtcttcgttcagacgtgtcctccttctctgtgtggttttctatgcgcaatgcatttatttattttgagatggagtctcactctgtcacccaggctggagtgcaatggtgtggtcttgctcactgcaacctccgcctcccgggttcaagtgattctcccgcctcagcctcccgagtagctgggactacaggtttgtgccaccacagctggctaatttttgtatttttagtagagacggtgtttcactacgctggccaggctggtctcaaactcctgacctcgtgatccgccccacctcggcctcccaaagtgctgggattacaggcgtgagccaccgcacccggccatgcaatttatttttattgttttttaaagctagtcaagtgaagcagtgggcgtgtagaaggaacaaagaaatctgtaactggttgtgatcaattagttttaaacaccactgcacctggaccagcagctatgtacaatttgaaagaacaatacactcctttcagaaacagctaaaatagcccacctttttcagaacataaagagaggttatcaagggctgggggggaaggggttattgtttaatgtttgggatggtgaacacgttctggaaatgggtagtgtgatggttgcacgacattgtgaatgtatttaatcctattgaattatacctttaaatatggttaaaatgttaaattttatgttacgtatgttttacaatttaaaaagcacaagttttttgaggcatgaaatgatagctgcaaaagatgttcaatcttagctcattgctgctgccccaggtgtgtgtgcataggagattatgtaaggaaggctcaactcacaacacatggtctgacaaagtacaagtgtatattcatgggaatgagggaaaagataaaacttttgaaaaggtagtgaaaatatgacataaatataggcgatgcctggaacactcttcactggcccctttgcctggttgactcctgagttccatatcacttcttttggaggaccttatagggcagtatttttccagacttcactgtgcataagaatcacctggggaccttgttaaaactgcaaattctcattcagtagatctgaagtgaagctctagcggcatttctaacaagttcccaggcgatgctgatactatagatccacaggctatactagggggctgcgtaaatttagtctttctttatcttttggaaacagatcttgctctgttgcctaggctggagtgcagtggcatgatcttggctcattgcgacctctgcctcccgggttcaagcgattctcctgcctcagcctcgcgagtagttgggactacaggcgcccgccaccacgcctggttaatttttgtatttttagtagagacggggtttcaccatattggccagactggtctggaactcccgacctcaggtgatccaccagcctcggcctcccaaagtgctgggattacaggcgtgagccaccgtgcccggctaaatttagtctttcttagttcaccattatatccctcatgtccagcaaggtgattagcacgtaggaggtgctaaataaatatttattggatgaatgaagtatttaaggttggtgtaggaggttcacacactttgcgaagttgcctcatgctctgtagaataaggatattaatactaaattatttctgaccttaccaccttgctgcgtcaactctaatctttgaaatagtggccgtagacactgcataccctggtatgcaagcctgaggaagccttgctgtggtctacaatccttggaaacaaattctctccagccaacgaggaagcggartgcaaggaacctgctggtgtggggatttccagattttggtgcctgagtaattgctaccttggcctcctccaaatcaaagaaattaacagcttgttaaacagagtgttaagggaggttcattacccttaaatccacgaatgtaataatattgccattatttactcttatcgtttaggatgatgataacgacagtggcagttgagggatgaagtaggtggggaagttgggggaggggacagagggtgtgagacagccggagaaagaggaactacaactcccagaactccccgggaaagcccacgccgcggcggcgccccacccctctcagcgaccagacccgcccctccgatgacgtcacagaggtgacgtcacggcgcccagagcgaggctggggtagggaggccgactgagcaggagtcgtccgcttatagtggaggctgctaggagccggtcagagggtgagtggggagcaggcgagcgagccacagcaggcaggagggagcgtcgcgcggcgcagaggagcgccggggcagggccgcggcggaaccacagccggagaggggcagcccgagccgggcgccgcagggtccccacccccacccggccggacagtgcccggtgttcccccgtgcgggggrcggcggcggcggctgacgggaccgycgggacmgcgggggtgttgccacctccaccgaggagccggcgcggccgcgggctcctcagagccggggccccgggcccgtgacagacgggcmgaggaagggagagaggcggcggcgacaccatgtcatctcccagtccgggcaagaggcggatggacacggacgtggtcaagctgtatccttcgtggaggggaattcgggctgtgtgtggggggcggtgtggggatgcccagggcacccccggaaccactgcaagggccctggggcactccaggccactgtccgagactcccctcctcccccagtgcctacggcggctccttggcacctcccaggggccgagagccttttcagctcgccttttctccgcagcaccccgaaatacgcgttgctgctcgctcttcctgtatccccagagcctgtgactttcctccgcgacgtttggactcccgagacggccttttttctttttgcacgaccagtcgcctcactctctaccaccgagcccattttcagggtttctctctcctgtttgctcgctttggatttagggaatcaaggcagaaattcccgagagggaagcctttctccgtttcttgagatgcccccatttcctccaaccacaatgctgcttgaactggggtcactcaagcgacctcttttatccctaattcctttctatattaggaagagagtctcctgctcagggcsccctcttctaagaaagagctctgtgtgttttcartcagtccctcctgttaagctttctggtccccgggagaaccctactgttttcctttccactgacaaagcctgtcccacccatagttgtatgtgatgaagacccccgggccctccagcaagccaccctccatattgtgggtatgacagctggggaaagaggagctcctggacaaaataaatagtccctggactggccacttgggcaaaacttcctctgtgagggtcaggttcttgggggaatacttgccctgatgtcgccaagtgacaccctttattttctgccccctccccccaactttatgcactctggaggttgcagtgggaaagctataactgataagagcccttcaggcagtggttttggttggagtccagactgattatttcaggaccagctagagaaattcgcgaaggttcctgtgacaaatcgagaattttttttttttgaagggtagtttagagggtagggggagcccagagttctgaacagctagtccttggggaggggggcaagtgggggcttagagggtggtagtgtggaacacagtttaaaagtcctgtctcctgtttctctccctcctccccatccccccaccgtttccccctgttgcagggttttgtttatataactcaagttgtttggctaaattcttcaggtgaataccttttttcttccttttatttgttgctgtttttgattgagtgttttacctctttgtagagatcagtggttattgtcaaaaaattcagttagggaatttgctgaagttttaaaaaagtagtttttgcatatggtttggcagtgggggatgggagggaagttgtctgggcaagagatttttaaaaaataatcttttcagaaataaggtgtttttctccttgctcagggaaaacttggttagaaattaggagcagtagatagacttctaagtttgtggtttggagtttagaatttttgggggagtgggagattagagcggagcaactaataaagtatagtgtacccaatatatgttcaggcgcaagtgaaatcaactctttatgagctgtttgtggctgtgattgttttgtaaatgtgtgaatgataccagtaatgttggcttttcataaggctgcaggaaaacttgtaactatgactgtgtgtacattttacacaaagcagtttcgggttttatttttgtttagaaactaggaaatgacatagtggcagcatctgagttatttttatcttgaattgagagttactgtcacacctaatgcgaatttctacctaatgtttaattgggatggagtggggagacaattccagctgtttgtgatcgttgtcagagtctcaaattatgtacatagacatatttttaaaagattgaggataaagaggggggcctaacttgacctgatgccttttccatacagtgccttttgttcatttagtagttgtggcatctagaatgattaccgcatttaggagtcggggtgtggggggtggagagggagaggaaaacagacaaagaacagcagggtgtcttttttttctccccctaagtggcttatttcatagcttatttttagtagaagatgaagaaaggcaaagatgcattggccttctgttctttccccaccttccttcctttctgacaaaagaaagcagaggcgctttaaaattgtagatctgagataggaggataacagtttcgagatttaaaagccagaggttatctttgtttcgtgtttattttctggtataatggagtttggaagttaaaatgtttcggatttccttttgtgtgtgttgtgtaggtgagagattttgtgtcctcctttctctgttgaattcacagatcagtaggcccaaatggagccaacaatttttgagtaaggtatatttagcagaaaatttaaggaaaaattccccagccctctactaaaatgagtacaattgtgtgaaaaggctgggggttgagaaagatggtggagaggaagtaggaagaaaaggtctgaaggaatgcacttcttgccccccatgccccttgatgatttctttggtgtggggggcgatagctggtttccttgcagtctcctgtttcagcccatttttggatgtctcctgagcgtaattataccaccacgatttacagcctggcagggaacctatatagtaggaaagtagcagtgtgggggtagggagagaagaggatgtgtaactaattggccgctgccttccaccacctcgctcggttcttttggagacaccgtctctggttgttgtttggagtcagtgatatttcttttgtgacgggttggtaggagagctgactcccaagttatgcagggagtgagtgttttgcaccaatgcacttaataatctgctgggtgattatgttctgaaactctgactcattcattgtttctcttctgatcctttgctaagggttgtgcaaacctccccaggagcctagaaactgatttacatgacttttggatcctttaggaatgtgtcccagtaaaaaaaccttgcagttagcccagatcctatggaatagtctcgaatagtgcggccatttgtttgcaaagtcaggtagattggtgatctgtgctgcccagagcctggcaacctttgaggtttccacctccaaccagctgattatttagattgtctgagagctggggctctggtgaccttaaagcgtgatttgccctaaaggaatatcggtttaagttctccctggtggaggaacaaacagctcagattacacgggtttccttgttggtgggggttactcgtctcaccctgttgcacagccctggtgatcctttcatctgtgaaccagtggcccctgctgaaggctagagctgcttgttttggaaaagcgtatgcaggcaaaaggccgcaggcaccgctcctcagcgctcattggccgccctgttactacccggaaaaggaggaggggaggagctaccaaacagctgatggagtatgtgacaagagagtgtgtttatatacaaaagaggtgggggctggggaggccctctgagtggtgttacaggaacaagtgtgttttcgaggggtaaaaagagaagaggaaaacctgacctgttagagtacaagaaatgtttagaaaaattaaggttaaatcagaaaagtagatcggataataatggggaccggcatacaccatatgtacaattttgtaacttacaataccaagagttttcaatgattcttcttttcagagggagttcagtaataggatcccccccttatttatttttacattttttgtagagaccgaggtctgactaggttaccaggctggcctcccaactcctggcctcaaatcttcctcctgccttggcctcccagagtgctggaattacaggtgtgagcccagtgcacctggcccagggcatgccactttaaatgcacttaactgactcatttgcagggattccaaagtatggcagaaatgtcagcttcccttaagaaagcgtcaagtgtgatagaaagggacggtgtcttacattaaaacggcctgagttaattttacagaatcgttggtgtctgctttagggtttcagaagctttctctaacaaattcaaaacctcagatgtggccaagtgtggtggctcacacctgtaatcccagcattttgggaggctgaggcgggaggatcacctaagtgtaggagtttgagggtccagtgagctaagatcatgccactgcactcatgcctgggcaacagagcaagactctcttaattaaaaaaaaaaaaaagctggcacagtggcttatgcctgtaatcccagcactttgggaggccaaggygggcagatcacctgaggtcaggagttcgggacaagcctggccaacatggcaaaaccccgtatgtacttgtactaaaaatataaaaaattagccaggcgtgatggtgcgggcttgtagtcccagctacttgggaggctgagtcacgagaatagcttgaacccatgaggcggaggttgtggtgagcctaaattacaccattgcactccagcctggacgacagagcaagactcttatctcaaaaaaaaaaaatcctcatatgtttgggtacttgctttgtgccagcattgtgctgggagtttagtagtgaaaaattcagtatgggtggtcatggtgcttatgcaattagttaaaactttttttagtcggaaaggacaggctgtgttaggtcattgctgtgtgtagtgcctttttgagtaacttgtatttacttagagtggacttttcaaggaatagaaaggttaaaatgaattttgtgtgctaggatgtatatggggatctgtacacctgtttaaaaaaatttcaaaactaaaatattaaaatatgtagccatttgtctttgacttaactttggtattttgctgttaatcagtagttactctatccctaagttagtagtctttgttactctttaatttgtrttcaaagggtagacagttccctaaatcttttaactagttctagtgtcaattgggaacctgtggtttgcctctttatttccagtggmctctgttttagtgagatgatgagatgaaagttggcacagctttatggtcttcaagctaaaagttaaagatttggcaactctcagtgttctgaatttgtcttccctgcctagattttggtgacaaatataacatactggtacttattttggttaggcaggaacctacatgagtaagcattcacagcttcagaacatctgattcctgcagtgcagttctagtaaattacacgcaagcctaaaaattcagctttttgggaaaaaatgtttcgcagatgtgacccataaacgtccctcctgtatttgtgtatgtatgttagaacaacctaagtttgttggttttctagtgttgcaattttcttagccccttgacctgcattttatagatatatttaaacattggtattcttttcagtcttaacagatttgatggttccaagaatcattggatttttaggcatgtaatccagaccttacattacgttataatgtttgcaacgtaatagctttttacctgtagacctacagagtgtacctgttagtaaaatacttaaaagaacttagttggatttcaaaagtaaaaagataattgagaaaaacataggttacaagaaggaaaaccagtcacctgtaatcctagttctttaaacagtagttctcaaactttagtttgagattgcaccactgcactccagcccgggggacagagcaagattccatctcaaaaaacaaaaaacaaataatcacctggagagtttgttaaaacaggttactgcataccactcctggagttttctaattcattgggtctagggtggggtctaagaagttcgcagatgatgcttctggtccaggaccactgtttaagaactgttggccttaaatgttaaccttatggcttttttcctatatcttttattctccccaggatgtattgttttcaacctgttgatcatactgtatgtgtctgccctgtttttgcttaatatttttgcaactgtttttcccagttaaaaataatgactaggggccgggcgcggtggctcacgcctgtaatcccaacactttgggaggttgaggcagacaaatcatgaggtcaggagattgagaccatcctggctaacatggtaaaaacccatctctactaaaaatacaaaaaaaaaaaaattagccgggcgtggtggcgggcgcctgtagtcccagctactcaggaggctgaggcaggagaatggtgtgaacccgggaggcggagcttgcagtgagcagagatagcgccactgtgctccagcctgggccacagagtgagacttcgtctcaaaaaaaaaaaaaaataatgactaggctgggcacagtggctcatgcctatacatccagcactttgggaggctgaggtgggcagatcacctgaggtcaggagtttgagacctgcttgactaacgtgragaaaccccatctctactaaaaaatacaaaattagctgggcgtggtggcgcatgcctgtaatcccagctacttgggaggttgaggcaggagaatcaattcgcttgaacctgggaggtggaggttgcggtgagctgagattgcgccattgcactccagcctaggcaacaagagcgaaactcagtctcaaaaaaaaaaaaagtagctcatgtaatatgccatcccatggctgtgccattgatttaattctttgccatttttctctgatgaataagattgaaattaacatctttgtgcataggcttttctttgggttatttctgttttcccgaaatgggattctagatcaaagaaggtaaacatttgaattaaaatatttaattaaaaatctcagagccctacactcagcgggctcttgttttgttgtgttgtgttttagttggtatcgttttggcactgaaatagcctggcatagtgattaaagatgaattctaatttcctcattgtttaaactttgatgttttttgtgataatggtgatcctcaatttaggcataattttgtattctcagagtgcatactgcaagtcggtaggttaaatatatttatgagcagatagatctaacaggaactgtagaattagttttggcatcttggattcttttttgttattgaggtataattgacatacagttaactgtacatatttaaagtgatacttttgataagttttaattttatgtatcacccatgaagcttatccttatcaagagaggagacatatttatcttcccccaaagtttcttgtggccctttgtaatctttccctccctcccttccaaccattgatctcatttctgtcactgtagattattttacattttctagaattgtatatataagcggaatcattcagtacatactctttttgtgtgggttctttcacttataattctgagattcacccatgttatttagttcattttttttttattgctgagtagtattctattatgtggatataccacaatttgtttatgcattcacctcttaatgcttggtggcatttgggttatttccagttttgggctattaccagtaaagttgctatgaacattgtatggatatacgcttttttttctcttggctaagctagatcatgtggtagggtttgcgcatgcgcgtgcgtgcgtgcgtstgtgtgtgtgtgtgtgtgtgtgtgtgtgtgtgttttgagcgcatgcgcacgtgtgtgttttgagacaggatttcactctgttgcccagatgagagttcatggtgtgatctcagctcactgcagtcgtggccacttgcctggctaattttattttttttgtagagatgaggtctcactgttggccaggctggtctcaaattcctgggcttaagtgatcctctggccttggcctcccaaagtgctgggattacagatgtaagccgctgtgcccagccatgtttaacacgtagtttgaatttaatgtttactgatgatggtccatatttcacacccaaataaaattgtgacaacggttgtttcacttgtgtgttttgttttgttttgttttgttttgagacggagtcttcgctctgtcgcccaggctgagtgtagtggcgcgatctcggctcactgccagctccgcctcctgggttcacgccattctcctgcctcggcctcctgagtagctggaactacaggcacccgccaccaagcctggctaattttttgtatttttagtagcgacagggtttcaccatgttagcgaggatggtcttgatctcctgacctcatgatctgcccaccgtggcctcccaaagtgctgggattacaggcatgagccacagcgcctggcctcacttgtgtattttaaaggaatcatgttaaattacatgctcttaaagcactgatttattttttattattaaccttattttatagtatatgaattttgttaatttttttatcaataaaacaaattttaccacaatgattgtgatacctttcacttgaataatgatttaaacactttatcttccttttttaaagacagaatcagtctcgctctgtcgcccagactggctctctgcaacctctgcctcctgagttcaagcgattctcctgcctcaccctcccgagtagctgggattacaggggcctgccaccacacccagctaatttttgtatttttagttagagacagggttttgccatgttggccaggttggtcttgaactcttgacctcaggtgatccgcctgcctctgcctctcaagtactgggattacaggtgtgagccacgatgcctggccaatctggttttttgtttgtttttgtgtttgtgtttttagacggagtctggctgtgttgcccaggctagagtgcagtggtgcgatttcaactcactgcaacctctgcctcccggcgcttggcctaaagcattgatttctagctgaatttggttaaagctgatttggtagctactcttctctccccacccccatttgaaattagtaaattaaatttttattgtgaaatatttttgttagcctgagctacatggcaaaagcctatttctaccaaaacagataaaaaattagccaggtatggtggcatgcacttgtaatcccagctactctgggggctgaggcagaaggatcacttaagcccaggaggcagaggttgtggtgagttaagatcatgccactgcagtccagcctgggtgacagggcaaggccctgtctaaaaaaaatgttttgtggccctttgaaattacactttaggaatctggccggccatagtggctcatgcctgtaatcctggcactttgggaggctgaggtgggcagatcacctgaggtcaagagttcaagaccaacctggccaacatggcgaaaccccatctctactaaaaatgcaaaaactagctgggtgtggtggtgcacacctgtaatcccagctactcaggaggctgaggcaggagaattgcttgaacctgggagtcggaggttgtggtgagccgagattatgccactgcactccaaccccggggaacagagcaagactccatctcaaaaaacaaaaaaaaaaacacattacactttaggatcatagtcacaaacagcaattttatttttatatttgctagtaaggctctatatctttgtgaataggtaagcacactttttgttgatggtattattttctttgtaaagtattgataagattttttttaacatttctttagcatttctagtgaagtttacagcagttgataaatatttctggagcactctgttgaagtctgaataatatcttcaattttcacatggaataaactcaggtgaaaggaactaacagcagctcagtgacagaatgggaaacagactataagagttaggatatcctttgatatcatgctttcctggaatttttgtgtgtgtgagagacggagtttcactcttgttgcccaggctggagtgcaatggcatgatctcggctcactgcgacctctgcctcccaggttcaagcgattctcctgcctcagcctcctgagtagctgggattacaggcatgtgccaccacgcctggctaattttttatttttagtagagaggtgatccccctgccttggcctcccagagtgctgggattacaggtgtgagccaccgcgcccagcctggaattttttgaagcttttttttttttttttttttttttgagaccgagtctcacactgtcacctaggctggagtgcagtggtgtgatcacagctcactgcagcctcgaacttccggattctgaactcaatcctcctgcttcagcctcccgagtagctgggactacaggcgtgtgccaccacacctggcttayttttgtatttttcgtagaaacagggttgcgccatgttggccaaactggtctccaactcctgggctcaagcggtctggctgccttggcctcccaaagtgttgggattacaggggtagccactgtgcctggccttaagttaatttttagtgaaatggtgcttaaaatttttttttggcatcttaagagttatttgataggttattggacactgccataataaaattagacattgatttgtaatagttgttgttacattctttctgataaattataaacaatttatcttatggacatttacatgtgtgttgctaaaaaaaaaattaaagctggattcagtggctcatgcttgtaatctcaccactttgggaggagtgcttgagctcaggagattgagggtgcagcaagccatcattatgccactgcactccagcctggacaacagagtgagaccctgtctcaaaaaaaattaatattactgacagctggaacttttagtttggctaacaaaaaggtgacctggcttgtacctgttttagtttggagcaatgatagtatgtttggtragtagactgttttggtattcagacacaggaatggtgccctgagcatataaattccagtgtcttggccagacgcagtggctcatgcctgtaatcctagcactttgggaggctgaggtgggcagattgcttgaactcgggagttcgagaccaaccagcctgggcaacatagtgaaaccctgtctctactaaaatacaaaaaattagccgggcattgcttgaactcaggagttcgagaccaaccagcctgggcaacatggtgaaaccctgtctctactaaaatacaaaaaattagccgggcgttgcttgaactcaggagttcgagaccaaccagcctgggcaacatggtgaaaccctgtctctactaaaatacaaaaaattagccgggcgtggtggcttgcgcctgtagtcccggctacttgggaggctgaggcaggagaattgcttgaacccgggaggtggaggttgcagtgagctgagatggtgccattgtactacagcctgggcaacagactgtgactccgtctccaaaaaaaaagattccagtttgttattttctatgctgaagtgtaattcgagtgcattgtagaaacttttgaaaacacagtagtctgttgagaggctgttgttgcattagtgattctcaattgggtatcacattggagaagaattaagcttttgggggcccaggtactatggttattgtaatttcttctctgtacctcaccagatgcttggggaaggtgtctggttgtttataggctggtgctcaagggggtatctgcccatgaccagtagaacccaaatcctcaagagcctggggaagccctacatggcagccatatgcttaagagggaaggaggatcctttttgcctctccctgctttgtaggtatctaggacgttatgtaggcagtgtgaatagttgctgctgatcttctgacctgtccctgcagagaagtcagagagaggagtaggtagcccttgtgaagggagaggcttggctggactttgccattctctggaagactttgccattctctagaagataggcatggttggcgggtctgtcagtggactcaaaaaaggcacctgttctgtagcacttggaggatccatatttaggatatcaattaattgagaatgtaatctttgtctttggttcaatctcctggtttctaacttttaaaccatttttagggaagcattatatgtgaaggtaggagatactccctacatacaaaatcatgttattaatgttgtgaattatgcatttcctttttagtattaggcaactttttttcatatatcaagttatcatgtacacttttcaaggttttttggattataaaatcttagttgaggtaatataaatagaaaactagatacagagtgcgtgtctggtttgtgttacctcagaagcaattgggctgtcacttagcctagcaaaaagtaaatttagttgttttgtccaaagggtgccagtataactttggtaatctggattttgcttttctttctttctttctttctttttttttttgagatggagtctcatgttgtcgcccagtctggagtgcagtggctccatctcggctcactgcaatctccgcctctcaggttcaagcgattctcctgcctcaggctcccgagtagctgggattacaggcacgcgccaccatgcccggctaattttttgtatctttagtagagatggggtttcaccatgttggccaggctggtctcaaactcctgacctcgtgatccacctgctttggcctcccaaagtgctgggattacaggcatgagccaccgtgcccagcctggattttgcttttcaatttgatgactatgttgcatagacagttgctgataagttgattaatttaaaaattcagaatttggttggacatttccattgtagcatttgtatgtagaaggttgattggttaaagtcatatcagtaagagatcaccaagagtaatatatagatggatataatgttttcatggtcttmctgctggatgtttactacccttttgctattcttgaatctaaacctgtaaataaattagtgattctccttggcagcaaagcttggaactatataactcttttaattgtattccgaaagaaggaaactgggtaacaaatgctcactttcgctggttgcagtggctcattccttcagtcccagctactgggaaggctgaagcaggaggattgcttgagtccaaggctgtagtgtacaatgactgtgcctgtgaatagtcactgcattctcccacctgagcactatagtgagaccctgtctctaaaaattaaaaaaacagtcacttttatatggcatttggttctcacagctgtgaattgtacttgatcagatcattaattcaaactagaggccgggcgtggtggctcatgcctgtaatcgtagcactttgggacgccaaggcggatagatcacctgaggtcaggagttcgagaccagcctggccaacatggtgaagccccatctctactaaaaatacaaaagttagttgggtgtggtggcaggcgcctgtaatcaaagctgctcgggaggctgaggcaggagaattgcttgaacctaggaggtggaggttgcagggagccgagatcgcatcactgcactccagcctggtgacagactgagactctgtctcaaaaaaaaacaaaaaaaacaaaaaaacaaaaacatcaaactaagcctacaagtacataatcttgtgaggggaatcttggacagtttgggtcggctttgtttttttttttttgagacgaagttttgctcttggcgcccaggctggagtgcaatggcgtaatctcgactcaccacaacctccgcctcccgggttcaaacaatttctcagcctatcgagtagctgggattacaggcatgtgccaccatgcccagctaattttgtatttttagtagagacgggtttctccatattggtcagggtggttttgaactcctgacctcaggtgatccacccgcctcggcctttcaaagtgctgggattgcaagcatgagccagcctttttttttttttttttttttttttttttgaatgaggcagtctctctctctgttgcccacgctggagtgcagtggtgccatcatggctcactgaagccttgacctcctgggtgcaaagcaatcccgcctcatccccctgagtagctggaactacagtcacacgccaccatgcccagctaatttttgtatatttttgtagagacagggttttgccatgttgcccaggctgttcttgaactcctgagttcaagcaatcctcttgccttggccttccaaagtgctgggattacagttgtgaaccattgtgcctggccatggatttttattacaaattatattcaaatagatgaaaacaggagggaaaagaattttcagtatgtgtagtagttttgacaggagttttagccttttatcttggtggctgatattagatattaacgttgctcttaagtgtacttaagcacactaaaacattgaacacaatatgtgtttgataacacaattatcaagggaactgaggataaaagcactcatctttgcatcacaatatgacattattagcatctgttaactttacaaacctgattcatttagttcttcatagccaccatcttgataatgaataaagaaaaaacaaatgatgtattttgtcactctattcatttttatctataaagatttaaaatacctttcttttgagttaggttggttttatggttggaagaaggaaaggaggtagacctttgaatgccttgattgctgcccatttctctaggcagtgaagaaaggcagctaaagtgctgtctctgattatcaaatgccatatatgtgagtatacctgtgttgtttgtcatgctgttgtgaatactcacttgcttttttatccactcatcttttttatccacgagctcctgcattaaagtagttagtaaccagttctttctcttggagtaattaatgtgacttttcccttgtttgagatttagttaagagttttatatataacatataaaccatgatatatctgaaaaactgtatttgtggttcataaagactgtaatttcatttcattttcataaattgtatgttttttcttttttcttttttttgttttgagatggagtctcactctgttgcccaggccgragtgcagttrtgtgatctcggctcactgcaagctctgcctcctgggttcacgccattctcctgcctcagccttccgagtagctggggctacaggtgcctgccaccatgcccggctaatttttttgtatttttgtagagacggggtttcactgtgttggccaggatggtctcgatctcctgacctcgtgatccatccgcctcagcctcccagagtgctgggactacaggcgcgagccaccaccacacctggcccataaattgtatgttttcaagtctgtgtgttttttttgttgttgttgtttgtttgtttgttattttgatatggagcctcacacttgttgcccaggctggagtatagtggcgtgatctcggctcactgcaacctctgtctccccagttcaagcgattttcctgcctcagcctcctgggtagctgggattacaggcgcctgccaccacacctggctaactttttttttttttttttttttttcctagtagagacggggtttcaccatgttggccaggctctaggctggtctcgaactcctgacctcaggtgatccacctgccttggcctcccaaagtgctaggattacaggcacaagccactgcacgtggcctgaactggattatcttaatggacatatgtatctttttatttgcttaatgagaattagaaattctatttttttttttttttgagatggagtctggctgtgtcacccaggctggagtgcagtggcgcaatctcagctcactgcaagctccgcctcctgggttcatgccattctcctgcctcagcctcccgagtagctgggactacaggcgcccgccactacgcccggctaattttttgtatttttagtagagacggagtttcaccatgttagccaggatggtctcgatctcctgacctcgtgatctgcccgcctcggcctcccaaagtactgggattacaggcgtgagccaccgtgcccggcttagaaattctattttttgtagaatcagaaatcagtttgtgacttgtgtgcttttaaattgggcatattactcacttgaatgaattggataaaacatgatggttttagtctgccagttctggcagttttatttcttaaatgtcattcttaaagtgttttgtcagttctgatgaagttctgatggcatcttattatttaaagttaaattttaataggtattagagtcatagattttagcatgtttttatacttcgagaaaacctggactgcaaatactagtattacaaagcaatggtggctttccgaatataagggctcttagtgtggaaattaataatcatattctctctaggcaataatagcatttgttgccttaaatagtagcttaagaagtaataatgcttgactgtacacttcattaatgcttgactgtaccgcttcagattaggagagtaaactctggtaactttgttattattgatagaaaaaaacagatgaaagttgagaggatactacttttcaactgtgattaacatcagttttactagtagtcatgtttgttgtgtgaaaaatagaattaaaacaacagcctagtaatgtctgttaatcctgcttatcaatataagattcgtaaagaaaaataaaaatgacttagtagattttaatatcagtgttctggtacctctctacaacaatagattagatggcattgcatcttttcttaaggtgtcagaattgtatttaccctgttaatttaaagaatagaataagtgctgtaaaagtgcctgatttatggaagcttttgtcaggatagaatggcagcatgctgttttcatttcaaagttttatgtatttaattacctgagttatattttcttttctgttttttttttttttttctttgagacagtctcgctctgtcgcccaggctggagtgcagtggtgtgatgtcagctcactatgaccctcgcctctcgggttcaagcgattctcctgcctcagcctcctgagtagctgggattcaggcatgcactaccacgcccagcaaatttttgtatttttagtagatacagggtttcaccatgttggtcttgaactcctgacctcgtgatctgcccacctcagcctcccataatggtgggattacagatgtgagccaccatgcccagccttaaatttatttttaaaagttatatatttatctatatatatttctgcttctatgtatacctctatatatacatatgtttatttttacctttcacctctattttgtggtgcatatatatatatacacacacacacacacatatacacacacatatatatacacacacatatatacacatatatatacacacacacacatatatatatatwcacatatatatacacacacacatatatatactttttgtagaaatggggtcttgtcctgtctgtttttgaactcctgacctcaagtgatctggctaccttggcctcccaaagtgctgggattacagggtgagccaccctgactgttttttaaaatttttattttatttttttatatatattttccacttcagaattttctaagcagttgaaattactcctttaaatgagaaaaccttgatgatttttggtgtatgtgtttttatttcagcttttttttttttttttttttttttaaagacggagtcttgctctgtcgcccaggctggagtgcagtggcatgatcttggctcattgcaacctctacctcccaggttcaagcgattctcctgcctcagtctcctgagtagctgggattacaggtgcccacgaccatgcccgactaatttttgtagttttagtagagacagggtttcaccatattggccaggctggtcttgaactcctgacctcaggtgatccacccgccttggcctcccaaagtgctgagattataggtgtgagccaccactcctggcctcagctcatgtttttgttgttcttttttgtttttaaagcaaggtcggtctgtgttgcctaggctggagtgcagtggtgctttctcggctcactgcaacctccacctcccaggctcaagcggtcctcctgcctcagcctcctgagtagctaggagtacagtcgtgtgctataatgcccggataatttttgtaattttagtagagatagggtttcaccatgttgcccagggtggtctcaaactcctgagctcaagtgatctgcccaccttggcctcgcaaagtgctgggattacaggcatgagtgactgtgcctggcttgtcattgctctataatgtacttttcattctaatacatttcacgtttatccttgcagcatttttgctttgagatgttatggcccactttttgtgggttaaaaatctggaccacacaggtcagttaaaggtgctgagatcagagtaagtccttatcacagtggatctggggctaactatggtttcctaagcttttgtcccttatagctttgcctgtgtagtagatgctcagcaaacacctgttaaacggattagaataaattatatactactgggttttcaccaagtccttaggtcatttttagactaaactttggcacctgcaattgaaacgatatggaaatcttgcaggaaagtgttgaatcttcctccaatgatggggaattcaattcttttctgtgtggatgtcatttgcctttttatgtagtgttcattttcccacatgtaacgtgtgtttgttttcttaaatggtcctaaatgctaataccttataggttattcaatgccgttttcagatggttgagattgtttgattcctggtgtttaagataaaaggaaattaaggttgtgcattggggaaagaaacagctgaaacttgctttacttcatttgtaaaatagaataccttaaactcatccaaattatggagctttttagtaccctgttttataagttgcaaagtgtttccagttcctccttacaaatttagaagttctaaaaggggttttccttaatatttgatactgtcaacttcttagtttgctcaggacttcattaaggacctttatgttgtgtttatttttacctttcacctgtattctgtgacaaaagaggacttaagaactacttcagcagctcacaccttccataaaagtatgtggccttttcttagttattcagaataataggaaagatacttaaaccagatatttaaaatctcattttacagatgcaaaacctgaagtttagtgttatatttaaatgtatatacacataagtatagcttttgtttttctttgtttgtggacatgtgcttggtgaaagaggaacagaattttactctttaggtttttggtaagtaacagaggttctggcacaggtgatgtctggagccccctagggatccccaagatactttcaaggggaatgtgaggtcagaacttttcatagtaatattgattcattatgtgccctttttgcccagccaacagttttctgatgtagatagacagttctgacaggacttttttttttttttttttttttttgagacggagtctcgctctgtcgcccaggctggagtgcaatggcgtgatcttagctcactgcaacctccgccttccgggttcaggcaattcttctgcctcagcctcccgagtagctgggactacaggtgcccaccaccacgcccggctaattttttgtatttttagtagagacggggtttcactgtgttagccagcgtggtctcgatctcctctgacaggatttttgatgtatgatgaaatggtgtcaacatttggaagatctgtgtaagtcagtgaaaactgttttccaaatggccagtgcatgacagaaaaattatgcctggttaaaagatccattaaaaatgcaaagtaggctgggcgtggtgcctcacgcctataatcccagcactttgggaggccgaggtgggtggatcatgaggtcaggagattgagaccatcctggctaacacagtgaaaccccatctctactaaaaatacaaaaaattagccgggcgtggtggcgggcgcctgtagtcccagctactcagggggctgaggcaggagaatggtgtgaacccgggaggtggagcttgcagtgagccgagattgcgccactgcactccagcctgggcaacaagagcgagactccatctccaaaaaaaaaagcaaagtgggctgggcgcagtggctcacacttgtaatcccagcactttgggaggccgaggcagkcggatcacgtggtcaggagtttgagactagcttggccaacacagtgaaaccccatctctactaaaagtacaaaaattagctgggtgtggtggcgggcgcttgtaatccctgttactggggaggctgaggagtagaatcgcttaaacctgggaggcggagctgagattgtgccactgcactccagcctgggtgacagagctrgactccgtctcaaaaaaaaaaaaaaaaagcaaagtagaacagtggattttaatataagaatatgaaaagttcgttggtacaatttaagattccacattgcagttagcctttacgagacaactgcttgtcaattttggcattatatcaacaaaaaatgtccagaattatctgaaaagtctgttaaagtactcttttccaattacattcaaaacataccagattcaatacagaagcacatatgaaaatccagctttcttttcttaagctggatattaaagagagttgcaaaatgattaaaaactgttcttactatgttattctttgttttggaaattagttttttttttcttaaagatgatttatatttatatgcataagatttacttttaaatgaattaatattttgtgtttctaaaatggtaaataacacacatagaaaagctctttgaggtcttcaggttttttttttctttccccaagacagagtcttactctgttgcccaggctggagtgccatggcgtgatctcagctcactgcaacctccgcctcctgggttcaggcaattctcctgcctcagcctctccagtagctgggattacaggcgcataccaccacgcgtggcaattttttttttttctttttgagacagggttttgctcttgttgcccaggctggagtgcagtggcacaatctcagctcactgctgcaacctgtgcctcctgggttcaagcgattctcctgcctcagcctcccaagtagctgggactacaggcatgcaccaccacgcccagctaattttttgtatttaatagagattgggtttcaccatgttggtcaggctggtcttgaactcctgacctcaggtgatccacctgcctcagcctcccaaagtgctgggattgcaggtgtgagccactgtgcccggccttgttttttttttttttttttttttttgtgagacggggtctcgctctctcacccaggctggagtgcagtggggcgatctcggctcactgcaacccctgcctcctggctttaagcaattttcctgcctcagcctccggagtagctgggactacaggcgcgtaccaccatgcccggctaattttttgtatttttagtagagatggggtttcaccgtgttagccaggatggtctcgatttcctaacctcgtgatccacccgcctcggcctcccaaagtgctgggattacaggtgtgagccactgtgcccagctgttaatttttttttatttttagtagagatgggttttcaccatgttggccaggctggtcttgaacacctgacctcgtgatccacccgccttggcctcccaaagtactgggattacaggcgtaagtcaccatgcccagccgaggtctttaatttttaagaatgtagaccgcatgaggtggctcacgcctgtaatcccaacactttgggaggccaaggtgggcaggtcacctgaggtcgtcgggagtttgagaccagcttgagcaacatggagaaacctcgtctctactaaaaatacaaaattagctggtcatggtggcgcatgcctgtaatcccagctactccggaggctgaggcaggagaattacttgaacccaggaggcagaggttgcagtgagccgagatcgtgccattacactgcagcgtgggcaacaagagcgaaaccccgtcgcaaaaaaaaatacagagtgtaargcgtgctgagaccagagtgtttgagagctactactcctaacaaatgtatattggaagagaagtcatattatgataaagtctaggatgtgctttaattgtaacctagcacagtttcttgtatatccgttttttttgttttgttttgttttttgagatggagtctttgtcgcccaggctggagtgcagcagtgcgatcttggctcgctgtaacctccacctcctgggttcaagtgactcttctgcctcagcctctcaagtagctgggattacaaggggcctgccaccacacctggctaattttgttgttttagtagagacagagtttcaccatgttggccaggctggtctcgaacgcctgacctcaagtgatcagcccgccttggcctcccaaagtgctgggattacaggcatcagccactgtgcctggcaatgtgttaatataatatttgaaccagactggatagaattattcagtaaaccatgtaaatacacatttagctaagaaggaatattggtggcgtgtgaagatggtaagtgtttttatgtcagtaaacagtgtctggtttatcttgtattttatagattstgagacctttttttcccacatcttaacatctttgaaattgagatgtcttaaaatggtgataagtcatagtctaatgggcagcttttttctttcttggtgtgtcataaaataatggtgtgtcatagatgtaatgaaatgtgctagtgtctctttttgtgtggagaggagaaggaaacatactggatagcagttcagttcttgagctacgggatatggtgcattaaatgttactcttctttttttttttttttttgagatggagtttcactcttgttgcccaggctggagtgcaatggcacgatcttggctcaccgcaacctctgcctcctggattcaagtgattctcctgcctcggccccccaagtagctgggattaccggcatgtgccaccacgccagctaattttgtatttttagtagagacggggtttctccatgttgttcaggctggtctcaaactcccgacctcaggtgatccgcctgcctcggcctcccaaagtgctgggattacaggcgtgagccaccgtgcctggcccctaaatgttactcttatcaggcacttaattgactctgggcaattgacagtgcactcattgttggaatattctattcataaagcagttatctttatttcaagcaagaaaactagatttcaatgctagaattcaagtcttttaaaacaaagtgtaaaactcatatttgtgtatcttttttaatatgcagagccttttttctgtttaaccatattgttgattttctcctctttatatatgtatatatatatttagttttaattgacatatttatggcatacagtgatacttctatagatgtattcaatgtgtaatgatcaaattgggcatatctgtcaccttatttatcacttctttgtgttgggaacatccaaaatccactcttctagttatttgaaaagacaaaatatttgtttttatttatttatttatttttgagacggagtctcgctttgtcgcgcaggctggagtgcattggtgcaatctcggctcactgcaacctccacctcccgagttcaagcaattcttctgcctcaggcttctgagtagctgggattacaggtgtgtgccaccacacccggctaatttttgtatttttagtagagacgaggtttcaccatgttggcgaggctggtcttgaactcctgacctcaaatgatccaccygccttggcctcccaaagtgctgggattacaggcatgagccaccgtgcctggccataagttgtgtttgttttttgtttttatttttgtttttttgagacagagacttgctctgtcgccaggctggagttgaagcacttctcctgcctcagcctcccaagtggactacaggcrcgtgtcaccatgcctggctcttttttgtatttttagtaggcacagggtttcaccgtgttggccaggatggtcttgaaccccagacctcatgatccgcctgcctcagcctcccaaagtattgggattacaggcgtgagccactgagcccagccaaatttttttttttttttttttttaattttgagatggtatttcgccatgttgcccaggttggttttaaactcctgggctcaactgacccgcctcccaaagtgctggaattacaggtgtgagccactgcgctcagctacaataaattgttaattatggtcaccttcgaatgcacactaagacttatttctcttatctayctgtaatttggtatttgttaaccgatctctggctacctccccaccagactctagtaaccactattctgctccatttctatgaaattaacttttttagctcccacgtatgagtgagaatatgcgatacatgtctttgcgtgcctgctttattttacttaacgtaatgtcccctaaactcatccatgatgctgggaattataagatgtggttttaatttttttatggctgaatagtattcatatatagtgtattacataccacattttatccatttatttgttgcccacatttttttgttgtgtttttatttttgagacggagtctcgctctgtcagccaggctggagtgcagtggcgcaatctcggctcactgcaacctctgcctccagggttcaagcaattctctgcctcagcctccccaagtagctgggattacaggagtccaccaccacgcccggctaatttttgtatttttagtagagacggggtttcacgatcttggccaggctggtcttgaattcctgaccttgtgatccacccccctctgcctctcaaagtgctgggattacaggcatgagccaccgcacctggcgaagttgcccacatttttaaatttctaataggtttcttaaaaaagttactgaattctattattaacattttagtgtctctgttttattctgtataaaaataataggaccattacatggagttatgaagatagtgtatgaataaaaagcctaggcatcyttagaagtacgttttaaaaaggagaatagggccttggaaaagcacagagttgagtctatcagagaaggcttcctggtggaagcagaatgtcatagagacaggagatagatgagcaagagggcactcatgaggtatgaggcggttggtaggttatcttgattaaagaatcaggttgtaaataagttactgttaagtacatatgtactagtatgtactagagcgtggcgtttgtgaccaagattatgtgggctgctgtatggagaaggggctgagctttttatgatctgacactctgcaaccagtagggccatacctgatacttttctggaggtgtgatcacttatcagtcagccagaggaggactcttggtaaagaatttactcacaggttgaaatccaatcatggttggcagggttttaatgaattagaagacagtgaatggatttgtggcacattatatgagaatgattgagataattttttgaaatgcctctgctttttcaggtggctcatgactgtaatttcagcgactcaggaggctgaggtgggagaatcactcgaggccaggagtttcttttttctttttttttttttgagacggagtttagctcttgttgcccaggcggagtgcaatggtgtgatctcagctcactgcagcctctgcctcctgggttcaagcgattctcctgcctcagcctcctgagtagctgggattacaggcatgtgccaccacactgggctaattttgtatttttagtagagaaggggtttctccatgttggtcaggctggtctcgaactcctgacctcaggtgatccacccacctcagcctcccaaagtgctgggattacaggcatgagccactgtgccgggccgaggccaggagtttcagaccagcctgggcaacagagcaagaccctttatcttgaaaagaaaaaatcatagactttttcagatgtgtgacatttgaagaagtaaaatacagtggaataactataggcttcagtcacagattggatttgttatctctttgccttggtttcctcaaccgaaaaaggaaggaaatacttataatttgttttgaggttattttatatgaaatgtatgtgaatgtatttagcatgtaattgcttactggacagatcagttaggaattgtagttggctggtagtaacagttctggaataatgtagttgtgatggtaagttagggaggcagataagggcgggcttcatgtcatcagggaatccagattgccgcagtgtgtattcccagccctcttcagtgcattacttaatcttaaaggcatcgcttctgccatcacgtcactgtttcatgcagtgggaggaagaaaggggtgaataggcagaaggctaagagctagctgagactattcccctcctccaatgaccaaaggaacttttctgagtgtccctccctacacattgccctgatcatcctgagctagaagtgtctcgttgcaagaaaggctgggaaacaaggctctttgactgccctgaatacaatcggggttttgatagtaagaaggagagaatggatactgggttggatcacgtacagtgtctttcacagtgaatgttgtttcgcttttttctttcatttacatatttgggagcattattgtataggcctagctcccatgaactgtcccacattgtggattttatttttttcttgttttttttccacctggagaacaccgtgaatttttgtttatgaatatcttttttttttcgagactgagtcttgctctgttgcccagtctggagtgcagtggcgtaatcttggctcactgcaacctctgcctcctggattcaagcaattctcttcgtcagcctcccgagtagctgggattacaggagctcgccactacgcccagctaatttttgtatttttagtagagacggggtttctccatcttggccaggctggtcttgaactcctgacctcgtgatccacccaccttggcctcccaaagtgctgggattataggcgtgaaccaccgtgcctggccatttgtgaatatcttatgtctttcgggttctgctttgctgggggactgggcttatgtgataaaattacttaccttgagcattaaaggaaaacaaaaagttaaacttttttttttttattcatagtttagcttgtaccctcaacctttaactcagaggacctgatttgggagttcagcggtggttgaaggttggtagaggagaggcagagtgttgggaggaaaggagactgcctggaggaccgtccagggctttcgtccttggctctgtgcggctcagagaccttggggctttcacttccttcttgggttatctgtgtccttatctatcaaataaggagttggtttagatgattttaagtctctccaacttgaatattctgattttatatgtagacattatacatgcaactcttattttctgtgtgtgtgtgtgtgtgtgtgtgtgtgtgtgaatgtaaaaggccttcacaaccatatgtatacctggtattgccttctagggaatacagaattgaagatagagttatgacataaaatctcattttgaatcttattctctttgcagagaaatatgcacagtaaaactagataaattctgcaatttattaccttcttggtatgaatttttactagggcttttttagaagttcaaagtagaaaaccttttaacaccttcatttggaattttaaaatgtggcagtgaaatatttcacattcagaaacctgtgttaatgttaactaggaaaagtctcagtcttacgccattagtaatgatgtgttgttatcctttcatttctagaaatggatccctggaattagatggagtattgtgaaagtataattttaaacaaatgtttttgtagagacagggtctcactatattgcccaggctgatctctaactcccaggctcaagtgatcctattactttggcctcctgaagtgctaggattgcaagtgtgaaccaccatgcccatcctgaaggtataattattaaaatgctatccagtgttcataatctgcttatctaataattcaaatgctttgtttgccctgctgaggtcagactttggcytactctgtgaatgaatcagtttttgctgttgttacrgatggtagagttgagtcaagatgttaatggcccttgtccaatatggggagctagttaagaatgtcttctgattctatcctgtggagtgagagtatctatttgttcacttgatggaaacttacagttccctcgtgtcttgtttcagttttgtttttcatgtggaatacatctagagagacagtatggcttagtggatgggacaggcccttgtgagaattatttcaaataattttgtaatttcaacccagtaaatttctccatcactgttcctgatccctggcattatgaacaataggtttcagaaagcttccatgttttagaacctctcctacctgagattacaggtgtgagccaccacatctggccaaggtgttatagattctttaacctaaatttggcttattacttggaaatgttattgaggaaattggttatcagttttatgattttctaaattactatataacttctagtcacataaaaagtgtctaagcttgtccatagcaagagagggctgcttcaaattatgattaatgatattgcagaacaaaytctgggttggtagtaatatttattggttaaaatatagtagtaggcctttaacatggatatgactgtagatctttattttagctgccacatagttgtgaataaaaccaaacttacgaaaagcaggtaaaactttattttattttggaagttagttgataagggtaattcagattgaattgcataataatggcaatattaagtttcttgtttaacagttatggactggaaatttttctttcagcacttgggaggccgaggcgggtggatcacgaggtcaggagattgagaacatcctggctaacacggtggaaccctgtctctactaaaaatacaaaaaattagctgggcttggtggcgggtgcctgtaatcccagctactctgaggctgaggcaggagaatagcatgaacctgggaggcggagcttgcagtgagccgagatcatgccactgcactccaacctgggcgacagagcgagactccttctcaaaaaaaagaaaaaaaagaaaaatctcagatacaagccaggcactgtgtgtgcacttgtagtcccagctacttgggaggctgaggctggaggatcgtttaagcccaggagttcaagtcagtctgggcaatatagcaagatccccatctctaaaacaaaataactcagatacatataattagaatagtataaataaatatctgtataccaccctactatgtagactcaatattttgctatatttgctatctcatatttttggctgagccatttataatttgcaaatactgtgagacttcagtgtaaatactttaacatgcatcttcaaagaataaggactgtttttctgggcacagtggctcatgcctgtaacctcaggattttgagaagccgaggcgggtggatcacttgaggtcaggagttcgagaccagcatggccaaaatgttgaaatcccatctctacaaaaattagccaggcgtgatggcgtctgcctgtaatcccagctactcagaaggttgaggcaggagaatcacttgagcccaagaggcagaggttacagtgagccgagatcatgccattgcattccagcctgggtgccagagcaagactccatctcaaaataaaaattaaaaggccaggcacggtggctcatgcctgtaatcctagcactctgggaggctgaggtgggtggatcacctgaggtcaggagttcaagaccagcctggccaacatggcagaaacccatctctactaaaaatacaaaaattagccaggcgtggtggctggtgcacacctgtagtctcagctactcaggaggctgaggcaggagaattgctccaacccaggaggcagaggttgcagtgagccgagatcgtgccactgcactccagcctgggtgacaaagtgagactgtctaaaaaaaaaaaattaaaaaagaataaggacttttcttacataaacacagtaccattatcacaccagaggatattaatagtaacttcaattatatcatgtaatatccatagaggaaatattgaaatggtgagatgttttgtctagccactttcaaagaaagaaagcctgtatttttacattttaaacaacagtaattagacaaagttagcgccaaaaagattggtttgaaacccatgcaatgttagtgggaaaaatgttctcattcattctaataatttatgaagtcagctttttttttttttttttttttgtgacagagtctcttgttgcccaggctagatgcagtggcgtgatctcagctcactacaacctctgcctcccaggttcaagtgattctcctgcctcagcctcccaagtagctgggaccacagacgtgtgccaccatgcctggctaattttttgtatttttagtagagacagggtttcactgtgttggccagcctggtcttgaacgcctgacctcaagtcatccgcccgcctcggcctcccaaagtgctgggattacaggcgtgagccaccatgcccggcaaaatcagcttttaaattagggtttaaatttgcttttgtagctgcatattttaaaaagtttgcttgagcccagcaggttgatcctgcagtgagctatgattgcaccaatgcactccagcctaggtgacagagtgagaccctgtctctaaatagatgagtccatttttctgcccttagaaaatatagaatgatgagtacaattggaccctcaagagtaaagatcagagacagtgacacagtctagcagaaaataatggtacctgctgcaaagggtcattgttaccaagtaagtgaaattgtgtagtagtggttagcacagtatctaacacataagcacaccaatgttagctttaaaaaaaaaaatcacgtgtaatatatattgatttggaactataaacaccaggacttttttttttagaggcagagagtcttgataggttgtccaggttgttctcaaactcctggcctcaagtgatcctcccactttgaccacctaaacagtgagccactgtgcccggccaacaccaggacattttaaagattgctttttttttttttttttttttgactttttctagtcawttgtttattacattkttttcaatgacaaaatattttaagcaccacaacaaatatgtggaataaaataatgaacagcatccatttcccagttgtcagattttaacattgtcttcagaacttttttttgaggtaataacacctgaagttacactaaagcctcctgtgatgtctttcctgattccgcttccctccctgtcttcttgaattgtcatcataccattcatgtttattttctcatatatgtatgtwtgtagtattttgtatgtttatataaatatacattttgattcaatattacttttaagatttattgatattattagaagtattctagtagctttacttcatttgtttccagttcatttatattgagttatatgtgtaccatattttttccattttgttaatgcacatttaggttatttccagtttttcaccgttatatacagtgtcataattaacatttatgagtgtctttttgagcacatatgtgtttttctgggatagtgtttttcaagccttttttgttcactagacacagtaagaaatgtattttacattgatacccaaaatatgtgtgtgtttatttgcataatgttcatatatatatgcataaatatttacatgtaatagaaattatagttttataaaatatttaccctgaaaaaatatttacrcatacaatgtgagagatgcatacttgagatatgaataaatatcccttcatttaaaaataagctgatcaggacaatatttgacaaataatagtctaatgtatgtaacctgaagcagaattgctgctttgacagtgctcattttcagcttggcgagagatgaaaaatatcactcttcaaagtaattttaccaaactcacattcccatcagcaacatatgagagttcctgtttattcatatccacaccatcatttatccagctttctaacattttgcytatctgatggatgtgaaatggtatcccagtgttttctcagtttattttctagtcaaatatttttggtgccttctttctgtcagaccctgtgcaaagcagtaaagatggtaacaagagaggtgagacatggctttcctattctagggagcttgcattctaggagagagatgaactttgtctcccagtgagtggcaaagggacacacaacggggtgcaatgtgcagcctgcctagggaaatggggctgttccaagagatgaagtttgaccttggtcttgaaagatgagtgggcattttcagagagctgtggagttgaggggcattccgggtggaggggaggcaaaggcatagagctgtaaaaccacattattcaagaaacttaatgagtgttcatgactgtagagtcccaggattggtgaggccaaggaataagcagaggagagcctgcagatatggaggcaggtggagttgtatgctgccggcaccagactcattgaaggttttaagtagggtgttaacaggagttttattttgtttttacaagtctaggaatggattctggtattaaacgtgatggtcaatcaagtttttgtcttaatttcagtttcaaacgcattagcttagctgtttactatagtctttttgaaacaggtagataatagaaattattatatttcctttgaactagagttggtcattttctattctttcctagcatatgacacatttcctttcatccatgtgccttgttttttggtgctttttttttttttttttttttactttgtttttgtttttgagacaaggtcttgctcagttacccaggcttgmgtgcagtgacacaatcatagctcactgcagcctcgacctctcgggctcaagtgwtccttctacctcagccacctcagtagctggtactataggcgtatactaccacacctggctaaattttgtatttttttgtagagatggggtttcaccatgttgcccaggctgatttcaaactcccgggctcaagtgatctacctgcctcaacctcccaaagtgctgggatcacaggcaagaaccacagtgcacagccttctttcttttctttcttacatgttaaacatatacatagagaaagggtctacattgtataggctggttgtgagctcctggcctcaagcatccagcccatgctccttagttttcagtgggacaacaaatggtcttcacaggtgttttttattgtsaaatatgaataggtatagctttgtacaggttggtaattttaagaatttggattttggggccgggcacttgagcctgrccaacatggcaaaaccctgtctctattttaataaaaatacaaaaattagctgggtgtggtggcacatgcctgtaatcccagctactcaggaggttgagcatgagaatcatttgaacccaggaggcagaggtygcagtgagtcttgattgtgttgctgcactccatcctgggtgacagagcaagactgtctcaaaaaaaaaaaaaaaagaatttggattttttggacaatgtctttcatgaggatactttcagtctttatctcttactcttgctacattgtatgtagcaagtatggatatagttaaaagaacttcctttagaaagctggagtgcctcctgttaatcaactgtatgtgcgtgcatgtatatataaaggtgatgatatgagagattgctttggacttcttgcagcttttggcattcctgggctgccagtccctttttaataggagcatttgtcttgctttaagacatgaaagtttgaggcctgccagtgtctaataaaagcagtttttggagagcaaattacagagagtcgtgttttgaaattctcagtgccttaaaagaatagatgtgaaccatagcatggaatagtaagcacttattcgcgtgtgcatacttgatactagcttttggtgagaagtctcacacttgtgctagtgttaaggagcgtattcaaaggtatgttggtatgttcattgagatgcaggggcaacactgagcattgtgtagatcctatttttaatttaggagaatcctatgcaggtaggttaacttttttaaaccttacagttcaaagttgttgtttttttacccctccttttcacctcccagttcaaagttttaattgtgtttcctagctccttgatatttaacaattacatacttccctgctctctctaaaataaaggctttttattagttcaggatttagtccagggagaccttttactgcgtgaaccatgcttgagatgaaaagaactagacagaagcatgtattgcccagtgtccctgcctgtgccctttcttctcagaaaaccctggctagttgattgtctcagcctcatggtcttttgttaccaccaacctccctgcaccccagactccagcaggcacacacacatctgcacacacacagtttagctgatggagaaggagtagggatgtgagggtgtgtcctcagggtaggggctgggactatttcattttctttctgtcttcagcaaatgtaatgcatgttaacaccttggcagtaaaagtgggctggatcagttggatacaaggtgactgttctaaaataaaatgaaaaacagcataatctcgaatttgtaggcaacatgtgagacccagcaaatggaactttttgtttgtttgtttgagacggagtctcgctttgttgccaggccggagtgcagtggcacgatctcggctcactgcaacttccacctcccaggttcaagcaattctcctgccagtagctgggactacaggcacctgccaccatgcccagctgtgtttttttttttttttttggagacggaatcttgctgtgtcgcccaggctgaagtgcagtggygtgatctcggctcactgcaagctccgcctcccaggttcacgccattctcctgcctcagcctccagagtagctgggactacaggcgcccgccaccactcctggctaattttttgtatttttggtagagatggggtttcaccgtgttagccaggatggtcttgatctcttaacctcttgatcccccttcttggcctcccaaagtgctggaattacaggtgtgagccaccgctcccagccgcaaatggaacttttgcaggtggtttggccrttagccgtgtacatgcttagagtgtgtttaggctagtggacaggatgttctctgtgtgtactgtgtaaccttgaggctttgcgtctatttctatttccctagaaatgaaatctaaaacaggctgctttccttccccctagctttccaaacaaaagtaaggcttgtagatgtgaactagactgttgcaaagttctggagaggatggctgtggtttgggatttgatttttggtaggcttttttttttttttaattgttagaacttgagtgtgataaatggcttcttttttttttttaagtgggaagaaaatacaagatcattaaccacttgtgcatattctatttcaaatggcttagaaatttaaagcaaacttgttaaagtttgtagaagctgagttgttgatttctgtggtggataaaagccagtgctgtatctggaaactgttttcctrtttttcttagataccccttgaatcggatctgtttaatggaagaggatttttctgttaagctggttataatgccggttaaactttgtgtttaggatgttaragtcctggaatgaatataattacctgcctatataaaaaaagctgaagtcatttgaygaaaagttaacaagtgcaggcatgtgagctatttgaaaatttaaaatgcatctgagagagctttctaagattcagagggttttatggattttttctggctttttaataattgaactttatatgaaatgtacattttagctagatggacttacgaggcagatagaggtcaaggaatttttaaattatagattgtctttgcattgcctttggtctgtttctgtattctgaactgatgattgaaagaacgatctgtggtactcaacatttttatggattttgagatacaaagggagctcaaaagcaactgcatgctggggatggtaggagttctcttgaaagacaggcagagttaggagggtctgggccacttagcccgtttgcttttgctttggccacaggtacgggcaggytgttttacaaggagttaaagttctgcttctaaacagatgcctttctgtttcagtgtttcttcctagtgctctgaaaaccatatgtggggaaaatagttcgttctgtttagaggttaagggtgttgcctgcctgaaagtaccagtagtagtatttagtatttatttatttttttgagacagagtctcgctctgtcacccaggctggagtgcagtggcgcaatctcggctcactgcaaactccgcctcccaggttcatgccattctcctgcctcagcctcccaagtagctgggactacaggtgcccgccaccacacccggctaattttttgtatttttagtrgacggggttccactgtgttagccaggatggtctcgatctcctgacctcgtgatctgcccgtctcaacctctcaaagtgctgggattacaggtgtgagacaccgcgcccggctgtatttagtatttaaataaagtgtgaagaagcaggtgaagaaaccttcctaccatttaacaagagggagccaagcccgtggtttttgttgcaggaaatgtgcttctgccactcctttaaagctgtgaaagttaatttcacagcctcggggaaagacattgtttcccctaaagatcaggtcttgaagttggaagttgtcatttggtctataacttacactaatgaaaagcctcttagagtgcttactgtgtgccagacacattaatcatagtagtaacagctgacatttgagcgcatcctgggccggacattgtgttttttagcactttaaatatcttcctcagtcctcagaataactcaagaggtaggtactgttttctttttttctgttttaaagatgaaaccttaggcccctatctcatgccaagtaagttgcagagctgagagataagctcagtctgtataactcgggagctttgactctgaacaactaaattctctattatggtactgataattccctggactgtctggcagagagtgtggttctttatttcatcaagggagtgggctcagagaagataagtaatttactgtcataagccttgtgttgaaaccagaactcaaacctgggtcggtttgaagtgaaagcttatgttcttgccactgagtgtatcatatgacctcttagagtacattactgtaatatctgatttacaaagrtctttttatttcttgtgtcggcttccctctgtttctggaggggagttgtttaaaaggttgatttttggtcgggcatggtggctcacgcctgtaatcccagcacttcgggaggccaaggtgtgtggrtcacttgaggtcaggagtttgagaccaccctggccaacatggcaaaaccccatctctactaaaatacaaaagttagccaggcatggtggggcgctcctgtagtcccagctactgaggaggctgaggcaggagaatcgcttgaacctgggaggcggaggttgcagtgagccaaaattgcacctctgcactccagcctgggcaacagagcaagactctgtctcaaaaaaaaaaaaaattgatttttgaggtggctgttgggaacttgatacgttgtctgctggcagctatgttgcacctggttgtggttctgaggctgtctggccagagcccattggtacagtcaatacatgttaccttcttaagctgctgacaccaatctggcttccaagatatgcattgagttccaagtggggaagacaagcagatatgtgtttcctagtgtccagattccatttgttcttttataagtgttatctccttccatgtcggtaacaaaagtatggggtcgtagttaagtacagagcctctgaggtcagacttggttctgtcacccgctccctactagatgacttgaggcaaggctcttaaccattttctccccttgagagacagggtctggctcttgctcaggctggagtacagtggcgtaatcatagctcactgcagcctccaattcctgggctcaagcaatccttgtgcctcagcctctggagtaactgggactacagatgcatgccactgcacccagttaaaggctcttwacccttctgaggctcagtttcctcatctgtaaaatggatggatgtcctcatgagttattgaggggctcgaatgaaacatacaggccttagatgcttggaatggcatctagacatggcgggtgttcagaaaatgatggcagtggtggtggagatagcaataacttctctgctgtgtggctcttctcttctattacaaaagatcaggaccttttgtaacaggtcaaggtgaatgctttctggagtagactgttgtgttaatgctctgaattggatataaagtaaaatttgggattccctttattttgtaggcacatgtaagtcaataaattgccttgtaatttaaatcctatatagtcaaattctgtgctgtactctttttttttttttttttttgagacggagtttcgctcttgctgcccaggctggagtgcagtggcatgatctcggctcactgcagcctctgcctccggggttcaagccattctcctgcctcagcctcccgagtagctgggattacaggcacccgccaccgtgcccagctaattttttgtatttttagtagagacgaggtttcactatgttggccaggctggtctcgaactcctgacctcaggcgacccacccgccttggcctccgaaagtgctgggattacaggcgtgaccaccgcacctggcccaatgttgtacatttttatattctttgaaaccttgacttttattggaaatgtacttggttgtgttgaacaaaatatttgaggaaaatttttagtgattaattattaaaaatgagccttttaagttcttgttgaacttgaacatagtgtacatttcatttctcaaatggaaaaactgaggtaggaaatagggataggctttgcctaaaggccgttgagtaaagtatgagtgagcgggctttataagggccaaaaacaggttgtgcatcccttatctgaaaatccaaaatctaaaatgctccaaaattcaaaactttttgagcacctacgtaacacaagtggaaaattccacacataaatacttaacacaaactttgtttcatgtacagaattatttaaaatattgtttaaaattaccttcagactatgtgtataagatgtatatgaaacataaatgagcccagtgtggtggctcatgatgtaatcccagcactttgggaggctgaggtgggaggatcgccaagcccaggagtttgagaccagcctggacagcattatgagaccccatctctttaaaaagaaagaaatgtaaatgaatttcatgtttagacttgagtctcatcgccaagatatgtcattatgtatatgcaaataaatccaaaacatttctggtcccatgcatttcagataaagaatactcagcctgtagtaaatattttaggctttgtgggctgtatggtcttttttgcaactattcaactctgctgttgcagcacagaagcagccatcaataatacgtaaatggatgggcatggcgtgttccagtaaaactttatttacaaaaacagggggtgggccctagttcgtggacccctaaactgaaggaacattttaaattctatctcataataaaggcctaccttggtcctgcatctctctgtgtacatgtattaaaggttgtttttcccttaggcttcattctcagtcatcttttcacataacacatcctttgctataaaatgattcatagacccggtatggtggctcatgtctgtaatcccagcactttgggaagccgaggcagaaggactgcttgaggccaggagtttgagattagcctgggcaacatatcaagacatcgtccctacaaagaaaaatttaagaattagccaggcatggtggcacacacctgtagtcccatagctactcgggaggctgaggcaggaggatcacttgaacccaggagttcaaggttacagtgagctatgatgatgccactgccttccagcctgggcaacagagtgagaccctgtctctaaaaaataattaaaaaaaacatatatgtgcatttttagttgagttgttgtttcctaaactctaggttagtgtaggtgcctgccttccaaatatctctccaagacgatcccaacaggcccctaaaaccttgcatgtccaatactgatgtcagtactatttcttccaaactcttactacaatctgtttttttgtttacttacctattgccgaagtgggaaacctgtgtgtcttaacaacctccctcatcctgtttgttctgtcctcattttttttttttttaattgagacggagtctcactctgtcacccaggctggagtggtgcaatggtgtgatctcagctcactggaacctccacctcccaggttcaagcaattctcctgcctcagcctcctgagtagctgggactacaggtgtgtgccaccatgcctggctaactttttttttgtatttttagtagagacagggttccaccgtgttagccaggatggtctcattttcctgaccctgtgatctgcgcgccttggcctcccaaagtgctgggattacaggcatgagtcaccatgcctgacctgttctgcctctttattctctcccccaaccctgccctccattgcgaccaccactgtttgattcagggcctcgggaccttacctggactgttggagataatctcacaacttcagggctccctgcatctagtctgtctccttccagtctgcctttcatcttggctgccagagtgatcctgttttgtttttgtttttgttttttgagatggaatcttactctgtcacccaggctggagtacggtggtgygctctctgctcactgcaacctccgcttcccgggttcaagtgattctcctgcctcagccttccgagtagctgggattataggtgcccaccaccacacctggctaatttttgtatttttagtagagacggggtttcaccgtgttgtccaggctggtcttgaactccagacctcagacaatcagccttcctcggccttccaaagtgctgggattacagkcatgatmctgttttttgtacatctgattatgctacttcttgcctaaaactccttagttgctctttagcacccatggtttaaagcctaaccttggtataaaaatcggtttgatggagtcttggtttaaaagtcagtttgatagagaagtagtgccttcctaccatcggtcaaagatacaatgctgtgctgtatgcctctcccctcccctagccttctcaagggacacttcctaactcttctacagagtccctttctcttttggcctttttgtttttgtttttgttttttttttgagatagagtcttgctctgttgtccaggctggagtgcagtggtgcaatctccgttcactgtaaccttcacctccagggttcaagcgactctcctgcctcagcctcttgagtagctgggattacaggtgcctgccaccacactcggctaatttttgtatttttggtagagatggggtttcgccatgttggccagactggtctcgaactcccgacctcaggtgatatgcctgcttcagcctcccaaagtgctgggattataggcgagccaccgtgcctggcaacttttgtttattcttcaatattcacctcaagccttgcatcttactcaaagccttccttgaatcaccccccctctatatttgttttcaacccttttcgtgtcttctgtatgctttaattgacccctttgttttcccctcagaccactttatataatcagctgtttgcttgtggctccaactcccacctctttcaagctgctccttagaagatagattctgtgtcttatctctttgtccctagatcctagaactgtttgtattgcgtctgggcttaagcattgtgaagaatgagtggaaaatggtaaatatttattactaaagaggtggggccacatgtacatttatatattttttaatacagacagggtctcattatgttgtctaggcaggtcttgaactcctagggtcaagtgatcctcccacctcagcctcccaaagtgctaagattacaggcgtgagccaccactcccggcccatttttctctttttgaagggttcttatttctactcttccagggcaattagaagcaaaaggaaaagacccttggactggagtctggtagaaagaatgctcagtgagcaaacctggggctctgaaccgtccccttgtatgtttttcatggccttgcagctcactccttggagctgtggttctttgaggtgtaggtcasaaattcacggggtgcttcatcaaagtgtgcatgtctgatgaatacctaycccctgcctgcccctctctaggtatcagtggggcggggaatgtcactctcctggtgattcttgtacatgtttcttcttcccatttccggccatttttcccacctgacattttctccctgctccttayattacatagttctttatgatctttctcctgtgttttgtattccttctctgagagagaggggctccagttgcaatgaggttcaaatgatggttttagtgtctcaattaaaactctgaatgcacttactttttttagtaaaagcattggtatagatgatggctaatattccagagttaaatagtgtacttcagataaaagtgagttaaattggcttttgtgtgtaggaagttacattctgagttctacgcaatggacttaagaacttttgaaacaaaacttaaggctgttagttaaggactcatggagtcagatctgcagtagagaacatcattctatacctcctgccttattcccctcttgtgaccccccatttcttccctttactggtaagaaacccaggagcaggcagtctttgttggggataatcatagattggcccttggaaagtggattggaaaatttgaaggtggtgctcatttgtgtttaaacaattatttgctatcatatttagcagtatgctttgctggtttttagattgaacctatgcagacagttagctggagcctctaaagaagaaactttttattcttaagtgactgactgcttagtaatctacataacaaatgaaccattttgcttcagagacgtgaaataggcatctataaatgaatagtttttgaaactaaagttgttaagacaaagttcatcttttcacagtagggtttctccagaaaaccctctttactctattgaaatgcagctagttgaactaggaaagcatattccaataataggcccatgcaattagcctttagtataatggaatgaatggtggaattttttgtgcattgtcatcatcagttggtgttagtcccaaaccacataatagctagaaaccttgattgggagacacaaaggtttcttattcatgggcatgctttaattcttgaaactagtaaaatgttagactcttaaatcttaacacttttttgataactgtctactgctggtaagattaagatatggtgcttcggaattatgtcattattttgagtgagaagaaatgtcgaggaactcttcatttagcaccatatccaagccaaacctcgtatagaaattacacagtggtgtgctggtgaatattgaacaaccaccctggggagggggataaagccctgatttgtaatgtttgctgatttctgaggtataaatactctatcatggctggtttcaggctactagtgttatgttgctgaagttgggaaaaaatgtgtataatcagctggcttgaattaatctcagctatcaaatattcaggattttacagcctgactttttttccagcctgtattttaataatctgcttattcttgtctttatctttgtcctttgttttgaaaaaattggtcttcctgaggtataatttatatgcagtaaaattcagcaattttaagtgtatacatttgatgagttttgacacatgtatacctcgycacaatgatgatattccattaacctttctatacacagttgccagattaattttcctaaaattgtgctttgcatccgtcatctacctcggcataaaaccttcactggctatgtactgttcataggataaagtacaaaatgctgtggtctggctctctaccgtcttgctttttgtctacttatctgcttttatctaccacaacccggctacatgaacctcttattgcaataaaactgatcaactggttctaggcacagttgctgcatctgtgcctttgctgtcagctgtaccctgcctatgatattccttggacatcatattccttcttgactgcttggcctttccttaaagtctggctcaagccccattttcttacacgatccaggctttactgattacttctgcatcccgacagctgtcataccgcttgttttggcacttaactatcgcaacttgtattgaaattccagaggtgttttttggagtcatttgatcttacccaacaaagttgtaaactatgatggggtaggaaacgtacaacggagtttttagcactttgctcaaaaaaaaaacaagaacaccccctaataaatggcttttgrtgatgataaacctttaagcagctcttccaactcagtgagtcgcaaattcagtaacactactggggagaatagtactctgttgtaccattgacgtagagactgaaggtttggtctgtcccagagcatagatgtgtagtaatgtctctcaaaactagtattagtcattaaagtgcacattggagattttatctctgccttgaaaattcatccaaaggtagttagcttcatggactttggacttttggcacggattaagcgtttaaagtaggtctccaaagaaacttctttgtttctctcaaccagctttattgcactttttgaagtactggtaagaggtcaggagggtgtatctcattggtttccttcctgtcccaggaagccatgttacggtattctgaaagaactttttctttttcagtaactttactataagcaaatttttttttctttttaaaacttgaattttctctgtaagacattgcatacttgttgaaagcagacattaaatgataacctaacaaatacttaacttaattctagatgcctawctgtttctcaggataccttgtaggttcctcttctcttaaatactggctttactcagggctgggcgcgtgactcacaactgtaatcccagcactttgggaggctgatgtgggtggatcacatgaggccaggagttcgagaccagcctggccaacatggtgaaaccctgcctctactaaaaatacaaaaattagccgcatgtggtggcacacacctgtaatcccagctactcaggaggctgaggcacaagaatcgcttgaaccgggaggtggaggttgcagtgagccaaggtggcgccactgcactccagcctgggcaacagagcaagactgtctcaaaaaaaaaaaaagaaagaaaaaaaaatggctttactcggggtttcacagttcatccttatctcttggtagttagtaccctattcttgagtgatttcatctattattgcctgaatgtgtttttagaataaaaattccatatctcttgagctctggtcttggatggccaaatgcctactggacatcttctctttgctgcttttcagagaccccagattcaacatgtcctaaatggaacatctgtataagtcttttttttttggagacagtgtctcgctcagtggcccaggctggagtacagtggcactgtcatagctcattgtaacctctaactcctggctcctgggctcaaaccatccttctgctttggccttctgagtagctgggactgcaggcgtgagccgctgtgcctggcctctctgtaagtcttaggccctctcttattcctcgattgctgaatggtattaccatcagcaataccaggataactcaacttgagataactcaagccagaaacattggaatcatccttggcttgtccctcttccttctctttctgtgtctgtgaggttcacctcaaacatttcttacaaaaatccttttcctcctctgttttgagttctggccaaccttatcctttgttgggaaggggactcccctgccttccaagcatctaatttgtgtactaagagcagatctacttccatggcatcagatgaaccaagctcataagtctgaaaggtacaactggaaaaccagcatataattttaattgtgtaccagtgtttctggtctctataggtaaacatagctgggatcccatactatcattggaaagaaggttattcgagaaggcattagaacaaaaacaatgagatgaatcaaatgtataatggtctgacacaatctgatgataccaccatctcatcgtagatctgttgtgaccagaaacctcatgtctatgaacaaagactccttttctcccctatctagttgcttcagtggcccctgccagtctttctttttcattcttcttctgagcttgcaggggtgacccttttatgagataccttaatcctttgcatgtctgaatacattgattctggctgtacttgaatcttgctatgtggaaaaccagattttctytttcaaatggcttgtactcccctcagtcattgtgtgttgatctcgagttgaactctgaggggccatcttacttcatgtccttggaaaaaacttcactgtagctgccatataagagcaaaatgctaatctcccattgcatttagccagcatcaccacctcttgaaaacacctttggcttccccacctcctggattaggacaggagcaccttcagtgtgcctcttcagcactgctgagtaaccctcatatcactcttaactgcctctttggtagtttattgattgttcatttccccactaaacttggagctttcagagggcagatgctctcttatttccagatcctactgtctagcgtagtgcctggcacctactcacactattcatttaaccagtttctgttgagcatccactgacacgtagccgaggctagkcactcagctacatgtcaggaataaaggcaaataaggttcttgccctcttggaagtcgaatttcgttcgaggtgagggaggatataaaaagacaaaatagtactcatgataaaacctacaaggaaatagacaatagaatgaggtagagaataattgggatggtctgttgggcatgtacttcaggtgatcggaaaggtctctaaggaagtgccatttagacacaccataaaggcctggtgcagtggctcacactgttaatcccagcactttggaaggccaaggcargaggatygcttaaggccaggagtttgagaccagcctcgccaacacagcgagatccccatctctatttaaaaaaaaaaaagacacaccttaaaggataagaatcagcaagctatctgtcaaaacagggaaatcagggctgggcagaagaaatagccattgcaaaggccctggggaggaagagagcttattgtgtttgaggaaatgaaagaagaccagtgtatctagaaaggtaagagaggaagaatgtggcagactgagaccgtgtcaggcatattgtgggcttggatgagtgaaattagacagctgtcgatacagtgagtgattcacatactttagatttgtttggaactagcactgttataaattgggattctaaatgttaattttgcacattcttttctggaatgttaatactcaaaaaataacgattgaaagataacctagaacttattattttttaagagacagggtgtcactctattgccgaggctggagtacagatgccagcatagctacctgtagccttgaactcctgggctcaagggatcctcccatttcagccttctcagtagcttggataacaggtgtgtaacactgtgctcagctagttttgttttgttttttaaataatagagatggcgtcttgctttgttgcgtaggctagtctcaaactcctgggctcaagcagtcctcctgccttggcttcccaaagtgctgggattacagacgtgagccaccacatgcagccatagttttaaaatttttgtagatatggcgtcttgctgtgttgcccaggctggtctcaaactcctggcctcaagtggttctcccacctgggtctcctaaagtgttgggattacaggcatgagccactatgcctggccgagaatttcagtctttatgtgaaatatatcctacaattacagacactcttaggatgttccttttcttgtctgaattcctatccctcaggagcctggaataaagctatattgagagttttctgtgtcttattgagaattttcacatagtcttattaaccgtcgttgcattctgctggttgatctattttagcacaactgttgaaataaatactgttcatttaatgccacatccttatctgaaaatcagttcaaggataagcacagctgagtcatttaagcttatatgagtacagtttttgaactttgtggattgtgctttaaactagtgtttagattctctgtaggtgcaaggcttctttcctcccttgctctcacacattctgtgcccttggctgcactaggttgcatatgcattattgaggttaatgggaagccaaatgcagagcagggagccacagtgagtagcagctctacgactcaatagcagtccgaccttggacggggttgcagcccgacagtgtattcattttttataatggaaacaatacttgcatgatagggttgttgagaggattaaacgatgtaacatatgtaagacactaacacctcttgatagaggcttggtaaatatttggcacctgttaatcctcagtttccccgtagggtaaatatgcttatccccacttttgtaaatggtggggggaggcaaggcttagagatcatttcacttgccttaggctggtgcttctcagttactggggactcttgttaaaatggagattttgattcagttagtctgaaactggggtccagtgtgttcatttctaacaagctcctccaccttaaataggaggctgtaggctacttcctaggaaatgggggagatgggcctcaaacccaggtttgctctactccaaagccttcccccgtcccatggagcctcccttattctcacttgtgcaacaggttttttgtttgtttgagatggagtctcgctctgtcgcccaggctggagtgcaatggtgcatctcggctcactgcaacctccgcctcccaggtccaagcgattctcctgcctcagcctcccaagtagctaggattgcagctgcctgccaccatgcccagctaatttttttgtatttttagtagagacggggttttgccatattggccaggctggtcttgaactcctgacctcaggtgatccatccgcctcggcctcccaaagtgctgagattacagctgtgagccaccgtgcccggccatgtaatggttttgttaagagacttatatgtagtttaatgattccttagattactaagatctaaagttacatttttttattcatttgctcagccttttcttagaactctttgtatgctgagttcccgttttaaagatctactttgaaagaagtaggactaagtgaaaacgggttaataacacttaatgttgtctgttggacaattacttgttgtctcatcatgttaaatactccacattgttcttctctctcccccgctcccccaccaaacttgcttctgctactcctgcctgccttttatttttgttagaacagtgtcatcagccgggtgcagtggctcacacctgtaatcctagcattttgggaggctgaggtgggtggattacttgaggtcaagagttgagaccagcctggccaacatggtgaaacctcatctctactaaaaatacaaaaaattagccagacatggtggcgggcacctgtaatcccagctattcaggaggctgaggcaggagaatcgcttgaacccgggaggcagaggttgcagtgagctgagatcacacattgcactccagcctgggtaagaagatctcaaaaaaagaaagtgtcatcatctactagattggaaatatcagatattcttgagtctttcttctccctcatatacagttagtcatccagttcttcaaaatctcgttgaaatgtggcttcccctccagccagtctactgcctatcagtacttacctgtctgtgcattagcccccaccgacctctatcccaccagcatctccctgtggcgctgtgcagtctcgctgttggtcaccttcctcatcagaacaagcctgagtgtgccacactcctctccagaagccctgtggtcttgatagagagaggcaaatagggtggctcaaagaacagacttgaactagactgcctgggctcctgtcctccctccacaactcaccagccacaaataatgagaaaggtacatttgctagggaaaacatttaaatacaaatactcatcttgatgtgtttaaacatgttgagacagttctgtctgaggtgaggaacaaattaaggatagatacattggtttcttattaatttagtgtttaagacagtgcttatttccttggggaaaaatactgtaaagaaaaagaaaacacctggtacggtgagtcacgcctgttaatcccagcactttgggaggccaaggcgagtggatcatgaggtcaggagatggagaccatcctggctaacacggtgaaaccccttctctactaaaaatacaaaaaattagccgggcgtggtggtgggcacctgtagtcccagctactcaggaggctgaggcaggagaatggtgtgaacctgggaggtggagcttgcagtgagtggagatggtgccactgcactccagcctgggtgacagagtgagactctgtctcaaaaaaaaaaaaaaaaaggaaaaagaaatcttaatcatacgatgctatatggctcagaagtgaataatatttacatgtatacgtatgtaactaacctgcacaatgtgcacatgtaccctaaaacttaaagtataataaaaaaaaatttacatggtcataatataatctctaaatagtgatttggccaacaatggtgatgtgattgtattccatggagaggaagaagaaacatgggggtgaggttgaaaatcctgatactccaatgtgagaaagtcatttgataatattcgaaactataaaatcaaatagtatatacaaatgttatatagatacaatgaattatcttccatgtgtttgaattatcttctatgggatctcacatttaagtagtcaagggtaaactctatggcttttagcaaattggagagtaacatatgtgttacattaatgttggatgttgagataattaaatccatgtcattcttttgtgagaacacattattttgcatgctgtaatagcacagtagtttggaataaggagctatttgacgtatcaggtccacctaagaaataagaagttaacttcatatcctattttgggcatagatttattttattattttaatttttttttttttttgagatgggtcttactctgtagcccaggctggagtgcartgatgtgatctcgggtcactgcagtctccacttcccatgttcaagcgattctcctgcctcagcctctcgagtagctggggttacagttgtgtgccaccacacctggctagtttttgtatttttagtagagagacggggttttgccatattggctaggctggtctcgtactcctcacctcaagtgatctgcctgcctcggcctcccaaagtgctggatttacaggtgtgagccatggtgtccagccctgtgggggcacagatttagaagtacaaatactttttaagtgtttgagatgtaggtaaaatactactccttgttgtttgattaagtgatgccgtatcagactaaactctgtccttgtttttgtttttttctgatcaggttctggagttaacctgtctcacacgttaggtgagatttaattgattagccttctctttgagatagttgatgaaaggtgcttcatatcttagtaagtttttgttcgtgaatcctgagcacatgcacgtgttgtgttaaagaggcaagaaggracagtagagcgaatccctgtgaaaagcatgcttttccccrtgggtcacctagccagggctctgttggattggtgaacagcatgagagaaaaaaaagcactggacaatttgagctgcgtttggcaattgaggtggtgtttaaaggtgaactttattttactataaaagctttaatactggtattggtgagagcatgagggaaacaggtctgcttaggtgatggtagttagaaagtaactggatgcaacctttttgaaggatatttaagcattatatgtcaaaattaggtatacagccctttgaatagaagttccacttctagaaattgcaaacagatacttgaaaaagtataccaacagacatgtactgggatgtttattgtaactaatagcaaaacaaaacaaaacaaacagcagacaacagccttcctattcactaatggatatgaaattacggataggtaaattatggtatattgacattatacaagcactaaaaaaaggagcttagatctatatgtcctcaaacatatcctccctagatgcatgggcagaggtatttacagaacagtttgtacctacatgtctttgtgtatgtgatgacgtggatgtgtgtgtatataaacatctctatggaaagtgcataagcaatggtagtatctaggcagtgggactagaagttgcggggtggaaaggctattttaagccccagtcatgtttttaaaagacaagaaaaaaaaaaaaaaaggcctgcaactcaacacttgatctgatgaggttatttggttgtattgagggtgctcttgtgtctttcaggagggattctcctctgcactgtgccctctgattgcaccagcacatctcacatggtggcacctgagcctatcagttctacttgtctccgtggtgcaaacacgagagaaggaaactcaatagttttttcaccttttcaatgtcaagttttcttactatatatacatccactgttgtgtctaggtttgttttctgttgttttgctaaatagcttgatttttttcatattattcagttcttcaggaagtactactccttgtgagaaacttgatttttaatttccttctcatacttcataacaatacagccttcattcttattgttgatgcatatttaaatctaaacttctacttaagtgattaggttggtttcttttatactgtttatcacttcatatgtcctaattgtacctgacagatcatttcttaactgtatgttaatcatttctgttggtcttgagctagcagttttgctaatatggcagggtggctttttctctgagatctatcacctgttagtagtatgatgctgaaaatagctctaccactcttgttgtatcacattgcacacctagatacagtctactttcacctcccttgactttccagggttttcttgcttatttactcatattggtgtgattttcttatggtagggtgtttctttaacagcaatttttttccataaaataattcatttcttttgcttattttcactatgggtttttttaaaaagcagcattccagtttttgttgaaagttttttatcccacttctttcatcctaaatgttgataaagataataaatacaggcagcttataatagctatttgaacgtattatcaaataaggtattttcctgttaactacacttctgtatagtttttaagcagaatttcaatcaagaagacactatttttctatatctctttagattactttttgatttttttaaacactgtttatacaagtttttatcaaacttccaacagataatgggtactgcctctcataaatcttccaaagggacaatggaaactgggcccagttgaataaagccatattcatttgttttggaacgcagagttctctgcatgtagattgcatttagcattctgtctagtgtatccatctgtagttttgcttttttcagaataaaaccttgacagtaattttgaacctgttactttatttctttttgcatgtattgctttaaaaaggccgaagtctagtattctcttcccctttttaagttttatgaaatcaaggttaaattgatattagtgccacttaatatttgacacctgctatgcctaatgaacttgaagtagtaaagggagcagcaggggtcagccattcatattatgcaagataactggagaacgagcagactatgattagagctttagactagtgggttctaacctctttataagagcaaattcattatttatatgtgcatatgtgttaccttttcctttttcctctggatttataggtatttgagtttcaagaattttcttgagattatattatagaagtcattaagatggggaatcaatctctagagacataaactggtaattatccagtgtagggaaggaaaggaagatgaggcatggtctggtttgtggacctgggtcttcgagtaagtggctccatgactttggggtgcgctgaatgtaatgtaagaggaaggggatgatggcatatctggcatctcttcctgcacattttttatgatccattattcacactttgatcatctttatctgctgaatgggtaccgcagcttggtatttattaattatcacccaccactctacagaggtaactatttgtcactatgaagaatgccaaagaaaatatttcctcgtaaaatttawctgcttactgtgaatgattcataaatgcctgattaaaaggtctgtgartagagatttttrtgcactgacttagctaaatgctatcttcaytgagtggcattgcagtctatatgtcaagttagagtaaaaactgtatttaaaatggaaaaacagaaaagggccaggcaaggtgactcacacctataatcccagcactttgggagcctgaggtagaaggatcactcgagaccagtagattgagactagtctgggcaacataaggagacctcatctatacaaaaaataaaaaatgagccggatgtgctgatgcatgcctgtaatccaagctactggggtgggtgaggtgggaggatcatttgaacctgggagggtcgaggctgccgtgagctgagccgggatctcgccactggactccagcctgggcaacagagtgagaccctgtttcaatcaatcagtaaataaataaatacaatgaaaataaaatgaaaaatggaagcagtgttcttaaagattttgttttttttttgagacggagtctcactctgttacccaggctggtgtgcagtggtgtgatctcggctcactgcaacgtctgcctcctagattcaagcgattctcctgcctcagcctctagagtagctgggattacagatgcccgccaccacgtccagctaattttttgtgttttttagtagagacggggtttcgccacattggaggctggtcttgaactcctaacctcagatgatctacctgccttgaatcccraagtgctgggattacaggcatgagccacgacgcccagccaagatttttcaaagaacactggaaacttgaataccaaaggcactacatagatactccataaagtcatattaaatttagctttttattgagaagttgctttgtgttgagcactttgagtggtatagcaaagacacataccgcccaaaaggggaagtaggattttttctgttgtttttttctgagacagagtcttgctttgttgcccaggctggagtgcagtggcgcgatctcaactcactgcaagctccacgccattctcctgcctcagcctcccaagtagttgggactacaggcacccggctaatttttttgtatttttagtagagacggggtttcactgtgttagccaggatggtctcgatctcctgacctcgtgatccacccgccttgacctcccaaagtgctgcgattacaggtgtgagccaccgtgcctggcctagtaggatgtttttaaatagatattttggggagrgggagttggggggaagaaataaatagatgttttcattaggattttgcagagggccacctgattatttgtatgtctttgtatcatttacggggaaattatatgttgcctatgacttggaagttttcaaggtgagttgctattgtcatttttaaggttgtgatttgttttccttgtcttgccagcctcctgtgattaggtaggttctgcctttggaatgacaaggttcttcctgcatgtttttctcatgtgcgcaatggtttcgtctcccctccacccttagaatttgcaggtctaggtcttccgcctgtgcttcccttcatgcyatagcccccatgtgacaggtgctagagactgtgtgacagccataactaaatgccacttgggacttctgcacagcatgtcagatgcacagctcattgtttgcctccaggcctacagttaaccaggaaagatttttgttgtctaattattttataatttcctgagagcagaaaaagtggattttaattaagtaccagatgtcttttaaggtcctaccttctaaaagttttccaaaaagtttttaaaacaatttttctagatttggaatttcattgtggacttgttaatatctctgaagtgtctcatgtcttgagaatcttgcaggactttattctctgcggttcagtccaagtttgcagattttaaactgaatgcttgactagctgatggttatttgacagtgagtgtcaatctttccatagaagtaggatgtactttgagaaaasaagttaaaaaaaaaaaatgatgggtatgggccgggcgyggtggctcaggcctgtaatgccagcactttgggaggctgaggccagtggatcacctgaggtcaggagtttgagaccagcctggccaacatggtgaaaccccatctctactaaaaatacaaaaaattagccgggtatggtggtgtgtgcctgtaatcccagctactcgggaggctgaggcaggagaatcacttgaacccgggaggtggaggttgcagtgggccaagatcatgccattgcactccagcttgggcaacaagagcaaaaactccgtctcaaaaaaaaaaaaaaaaaagatgggattagatatgaaacaaaagcacatcatttatttatttagagacaaggtcttgttctgttgctcaggctggagtgcagtggcgtgacatggttcactgcaaccttgacctcctgggctcaagcgatcctcccgagtagctgggactacaggcgcatgccaccatgcccagctaatttttttattttttgtagagatggtgtttcaccatattgcccaagctggtatcagagttctaagctcaaaagatctgcctgctttcacctcctaaaatgttggaattacaggcgtgagccactgcacctggtcccatttattattttatttttttgagacagagtctctgttgccagactggagtgcagtggcacgatctcagctcaccacaacctctgcctcccaggctcaagcagttctcctgcctcagcctcccaagtagctgggattataggtgtgtgcctccatgccctgctcatttttgtatttttagtagagacagggttttgccatgtcaggctagtcttgaactcctgacctcaggtgatccacctgcctcggcctcccaaagtgccgggagtacaggtgtgaactactgtgccaggcccaaaagtaggcttttgattaaccctttaggagttaagagagtaatatactatttagctaatatactgctaatttatatacatgcatttgtacattatgtaaatttgtaattttcagttgcaagtaagcaaatatgcactattgccataaaacagcaaagcagtcaagtttgtttattaaggagctattgatatttcatcgatagccttctagcttctaaatattttaaagtgcgtaactgaagttggaatttctctcaaaatcttattttttgttttgactatatttccttgctctcaagatggtatcattatttttccctatttcccttcacttttctctctctgaaactgtttctgcagttggatcatttctgactttgactatctgactttgtaaatctgcttttaaaaatattttgttggggatgggggtgtggtacttagatttcttatctttctgataaacctgtcttaaaatgtttctatgagtcttaatttttctttgaaaattttttactctattatttggaagtctggaggaataatacattcagggaaaagccaagttatagtgatgattttcctatttaagtaacatttacttggtttttgcctatgtttggcttgtgacatagaaactctaaatgaagcataacactagagaagaaaaatttcctctcctaaggctagactgatttagtctgctaggtggtaatgaacatgcttgccatttaaccttactcgtaccagttgactctgtaaaattttaaaactgtatgttactctttactcctaagataatgggtctttaaatattcagggtaccatagtaagttgccagatatttttttgcttctgggcaatacatatttattttgaaatggctatttttaaataagtgatacttcccttattcagaagctgtttgacagctttagccaactaatttagttgtaaacctgctaaaagttacatattttattgattggagagtgtctttcttaggacatatttacccttttttttttaaacataaagtaatctcatgaacttcagttatctgatttttctagcctactatagatacattttaaaggatagtagcccagtgtcatctcccaaacatagctaaaggttaagaacaaagagaaactaggaaaagaacctctcaatgcaaggactttagcataacagtatgggaaattttctacagcaaaaaataagtatattccttatttgttcctaagggtatccttgtattttgtagtacagtatagcaactattattcataatgatgacccagcatcaagaaagggtgtagttggctggatgcggtgggtcatacctgtaatcccagcactttgggaggccgaggtgggtggatcacctgaggtcaagagtttgagaccagcctggacaatatggcaaaaccctgtctctactaaaaatacaaaaattagccgggcgtggtggtgtgcacctgtaatcccagctactcaggaggctgaggaaggagaatcgcttgaacccaggaggtggaggtttcagtgagccaagattgtgctaccgcacaccagcctgtgcgatgggagcaagactccatctcaaaaaaaaaagaaaggttgaggccgggtgcggtggctcatgcctataatcccagcattttgggaggccgaggcgggcggatcacgagatcaggagattgagaccatcctggctacggtgaaaccccgtctctaccaaaaatrcaaaaaattagcttggcctggtggcgggcgcctgtagtcccagctgcttgggaggctgaggcaggaggatggcgtgaacctgggaggcggagcttgcagtgagcccagatcacacccctacactccagtctgggcaacaaagcaagactccgtctcaaaaaaaaaaaaaaaaaggtgtagcatgtttttttagtattctgcttaagaatgtaggaaaaaaactaacacacacacacactacatttataaactttgaattttagttttgtggcaattcatttaggtaaagtgtgtgtgtgttttttttttttktttgtttttgtttttggagacaatctcgctctgtaacccaggctgagtacaatggcatgatctcggctcactgcaatctctgcctccctgttcaagcagttctactgtgttagcctcccaagtagctgggattacaggcacgtgccaccatgcccagctaatgtttgcatttttactagaggtggggtttcaccatgttggccaggctggtcttgaactcctgacctcatgatccgcccaccttggcctcccaaagtgctgggattataggcgtgagctaccatgcccggcctatttatttttacattaaaaaaattaagttcctgttgtgtcagctgctgggcctggtacctttggatatacagtatttcatttaattttccacaattctgtgagtgaggtaatgtcccttccctgcatcccctccccctttgtttagagattaagaaacaggctcagatttagccaggtgcggtggcgcatgcctgtaatcccagctatataggaggttgaggcaggagactctcttgaactggggaggcagaggttgcggtgagccaagatggcaccattgcactccagcctgggcaacaagagtgaaactccgtctcaaaaaaaaataaaaaattaaaaaagaggctcagatttaattgatttataagttgactatttttttttttgagagagtcttgctctgtcacccaggctggagggcagtggcacaatctcggctcaccgcaacctccacctcccgggttcaagccattctcctgcctcagcctcccaagtagctgggattacaagcgcccgccaccacgcccagctaatttgttttgtatttttagtagagacggggtttcactattttggccaggctggtctcaaactcctgaccttgtgatccacccgccttggcctcccaaagtgctgggattacaggcgtgagccaccatgcccagcctataagttgacttctttaagtcatgagttttccagctgtttataatatattgccacttggtttatccactgataacctcaaatttagtgttttcaaaagtaaacttactaatagtgtctttcattacaaaactgattcctgctgtcctgtgtttcactttgccattaatagtatcaccgttggctgggcgcagtggctcacgcctgtagtattttgggaggccaaggtaggcggatcacctgaggtcaggagttcaatcccagcctggccaacatggtgaaatacaaaaatctaaaaatacaaaaattagccatgcatggtggcaggcacctgtaatcccrgctgcttgggaggctgaggcaggagaatcgcttcaacctgggaggcggaggttgtagggagccgagaccacaccattgcattctagcctgggcaacaagagcaaaactccatctttaaaaaaaatatatatataagtgtgtgtatatatatgtgtatatatacatacatatatatacacacgtatatatacatacatatatacacgtatgtatacatatacacgtgtatatatatacgtgtgtatatatacgtgtgtatgtatacgtgtgtatatatatatgtggtatcactttacctgtctgagaggctaaaattaaggtctcagactggcaacttcattcatgtgttcatcttatttttaaatttatttgtttttaagctacagggtctatgtttgtcacccaggctggagttcagtagtgtcatcatagcttactacagactcaaactcctgggctccagcaatcctcttgcctcagccgtcaaagtagctgggactacaggctcgtaccaccctgcccagctaattttttggtgttttttgtagtgatgggggtctcactatgttgcccatgctggtctctaacttaactcctgggctcatgtgatcctcccctgtcagccttccgattagctaggagtataagcacgtaccaccatacctggctaatgtttaaaaattttgtttttgtggagactgggttttgttatgttgcccaggctggtctcggactcctggcctcaagcaatctttctgcccttgcttcccaaagtgttgggattaaataggtatgaaccactacacccggcctcatgttcatttgtagtctactgtttgctgggtactcttctgtgaacaaaataaacaattcctgctcttacggagcttgcactgcagtaggagataaaagtaaaatacatagtatattgcatggtgggaatgttaggagtaagtggttgtaaataggatatcccagaaggcctcactgagagggagacattggagcacatatactttgtttacacttagaaatttagagcttgaattagaaattagaagattgatttggagatctgcttttttgttttgtcatgaaaattagacattgtagcaacgttggagctttctactggctctgccaggtctgttcagctgtgaaggcctgtgagggctctgtttaatgtcccatgattcatgtggctgttatcttagttgaggtcttgaatatttctttcctactcttttgctttaactctgcttattcccaccttcagccagtcctacacaccacagttgggttatctttgtaaagcacaggtagatgcactgtgcatggaatactgtttccctgtttgccagataaaatccacacttcggagccctccgtaatctggtcttggcctactttctagtattccctagggtccactcatcaaaataaaaatgtattgttctcagtttcctgaatcagttctatactaaatctttgcattaaattccttctcccacctcgacatgtccaaatcacactctgtttaggacattttgtaagtccttaccttccatagcagaccatccctatccctccctccgggctggaagaaatctctcctactctaagctatagtattactttatgcaaactctttctgtacttcttaatgaacagatctcgtgttcccttgctagacttcaaacttctggaaggcagtctctgtgtaagagtagtttttgtggctgggcgtggtggctcatgcctataaccctagcactttgggaggctgaggcgaacggatcacttgaggtcaggagttcaagaccagcctggccaatatggtgaaactccgtctctactgaaaatacaaaaattagccaggtgtggtgccaggcgcctgtaatcccagctactcgggaggccgaggcaggagaatggcttgaacctgggaggcggagattgcagtgagctgagatcaggccactgcactccagccttggcgacagagtgagactccgtctcaaaaaaaaaaaagggtcttgctatgttgcccaggctggtctcaaactcctgggctcaaaacaatcctcccacctcagcctcctgaagtgctaggataacagttgtgagccactgcaatggtccctaaatctttatacatatggatttcatcactgatagcagcccacttcccattgtcttttctcaatgccacttttctttttttctttacttagcaaacctttcccaagataatgctcattttctgaatagcttttatttctgccattcaatttctcttttgaataaaaggcttccccctcttcatttgaagaacattaaaaacccttaaaaattttttcagcttcttatttcaatcaggagcctttctrttggacatgaccatttttccttgtagtttaagagctttggttagcatgttgcctagaggctgtttgtcatggatatacagacacatgcttgtcttccttccatgtgattgtatttttcatagacatccttatgaaaccacttgaacttgtttccttcagaatgttagcagagtatgcttctctttcaatgtaaagtctttggtttttttgtttttgyttttgttttgttttgttttttgagacggagtttcattcttgttgcccaggctggagtgcaatggtgtgatctcagctcaccgtaactttggctcaccgtaatctccgcctcccgagtagctgggattacaggcatgtgccacaacgcctggctaatttcgtatttttagtagggacggggtttctccatgctggtcaggctggtctcaaactcccgacctcaggaggtgtgagccacctcacccagccagtctttgctttcttaaatactggatcacttgctattttttgtcttcttcaaactgtcgcacctcaggaaaacttaacattgtttcataaatgttcaagagaggccaggcatgggcctcattaatagtatcacctttagctgggcgtggtggctcactcccataatcccaacactttgggaggctgaggcaggtggatcacaaggtcaggaattcaagaccagcttgaccaacatggtgaaaccccgtctctactaaaaatacaaaaattagccgggtgtggtggtgtgcacctgtaatcccagctactcgggagactgaggcaggagaatcgcttgaacctgggaggccgaggttgtggtgagctgagatcgtgcgactgcactccagcctgggtggcagagcaagactccatctcaaaaaaaaaaaaaaaaaaaagttcaagagagctctagtagctaaattctagttctagttcttgttcttagctctagtagctaagctttatgcctctacaaagctaaacttttgatgataactatgttattaggttttaaagaacttttactgtattatggaaaacttaaatgtaaaacaaaaatagtgagaacagtgtaacaaatcatgtgccgctgggactcgatcattaacataggattcaatcattaacgttgctggccctctactgtttcttctacacctcttctacccacactgggttatttactagcaaatcctagaaacatttttattagtaaatatttccatttatgtctctaaaagagaaggattccttgtaaacatatcccccccaaagcactatttttgtgatacttacatattaatggattaacagacatatctttttttttttttttttttttttttwaccaaaaaacaaaaaaccaggtagtgaaaattgccaagtttcttcagctttcctagtgtgactcatctccaggagagtaggaagcaggtgggtctgaacacagaaatccacacgacttgcttctgccctctgcacagaagcgcgttctttatgccaggacctcattcccttccacacagctcagggagggcactcttttattttatgaacttgttatcagtaaatttaggactcagtggtccctgaatccttggtccttgacctgttattgtcagtccttaaggcccagacatygcctttggcttcctttctggaaaatttcagaactgtataaaaatcacttgtaaaactctgacagacacattttgccaagaatgtcatttatctcttgacagtttggcatttgcctttaaatattagattgtgtaatcataatggcattccaggaaaataatgtggtaggtggctggcactttaaaaagtgaaatggacttgggttcttgggaatgttaatcattattctacacaaaatggtgataccccttaatagtgaaatgctaagtgggtataaagcagtatttgtgaataagatcaaaaaagatgagtataaaatgtgatttatgggtttatttaatgagtttttaccagaacaatgtctgaaggatattttatatttttaagctgtgaaacagagaaagtaatgaggaatcttctagtgagtsccaccagtctcccagcctgaccagcacatccagaaatcgatcattatttttgtyattttaacctgccttcttagtgccttccttgcccttgactttgcagcagagaggagaaagaaactcgtggtctctcccataaatacacgtggtaacagcagtgaagtaattattatatattttgtggcaagtcattcattcagtggtgatggaatggcttatttttaatgcagtgtttttctttggactaaacctaaattcttttttctatctcatttagtgcctgtccattccaaggcagcataaagttagcatagcttctcattttactggtttggtaaaagttttaaaggtttagttcagtttgcttttgggttttcatatgaggtagactatgagaactctttaatttatgatgtgatatataattaaagacaatcccattgtagctggcatgtgggctattactggggatcatgggaaagagaaggcttggaggatcttctttataaaatacacgtaagtatggactgaattccaaacaaaccgcaaaatggaaggaacctcgttttatcgcatccaggtaaaggatagaaaaggtatcttcagttttcccagaagcaacatccacaaggacaactcgtaattttaaatgattaaaagtaattgcagtagatcagtgtcattcatagcaaattagttctgattgatggagaatgctgcatctgtggatttttatgttataaaattaatttaagacttcttttgttaaactcgtttaatcttctgcactactccgttctttcattatccttgtcagttttaagggctggaatatctttgtacaactaaattcagttgacttcttctggatacccaagttgaacagacacatatattagtggagctctggttggaaagaggacaccagtacacactattagtagcctactgcatgtggtttgtgttttttgcctttttttttttttaagagaagttctctctctctcaggctggagtggagtggcacaatcatagctcactgcagcctcaaactcctaggctcaaacaatcttcctgccttaggccttccaaagtgctgggattataggcatgagccagtgcagccagccacctattgtataaatggcttataagtcatttcacctggctaggcatggtggctcacgcctataatcccagcactctgggaagccgaggtgggaggatcacttgagcccaagagttcaagaccagcatgggcaaagagagagaccctgtctctacaaaaactaaaaawattagctgggtgtggtggtgcctgctgtaggcccagctagggggaagtagaggtgggaggatcactgggaggtagagactgcagtgagccrtgatcatgctactgcactgtagcctgaatgacagagtgagaccctatctcaaaaaaaaaaaaaaaaaatagtaattcgttgaaccagtttcttattgataaatgtttagaccgtttccatttttaaacttcaaatattccaggaaacatatatgcagatttatcagaaacacttatttttgtaaactttttattaaagaataacatatatacaaaaagtagagaaattttttttttttttttttgagatggagtcttgctctgtcgcccaggctggaatgcagtggcacattcttggctcactgcaagctccacctcccgtgttcatgccattctcctgcctcagcctcccaagtagctgggactacaggcacccgccaccatgctcggctaattttttgtatttttagtagagacggggtttcaccgtgttaaccaggatggtctcgatctcctgacctcgtgatccacctgcatcggccccccaaagtgttgggattacaggtgtgagccaccgcgcctggccaaagtacagaaatttttattatttttttatttagttttttgagacagagtcacactctgtcacccaggctggactgcagtggtgcaattttggctcactgcaacctctgcctcctgggttcaagcgtttctcctgcttcagcctcccaagttgttgggattataggcgcataccaccatgcctggctaatttttgtagagaaattatttttgtagttcattgatgaaatctgtaaaacccatacattatgtgtatcaattcattcttttttctttttttaagttatatttttttgagacggagtctcactctgttgcccaggctggagtacagtggtgcaatctcagctcactgcaacttctgccttccggattcaagcgattctcctgcttcagcctcctgaatagctgggactacaggcacccgccaccacgcccagctaatttttgtgtttttagtagagatagggtttcgccatgttggccaggctggtcgcaaactcctgatctcaagtgatccgcctgccctggctccccacagtgctgggattacaggcgtgagccactgtgcccagcctatttttcttttttaatgctttgtaattttmttttgggtgactatactacagcttattctttttgccattgatgaacgtttggattgtctctaatttttggatgttacaaatagtcctgtgaacattcttaaacatcggtttcggtgaatgtaactatccatatgtattgggcgtatctccgggagtagcgctgacaggcatagggtatgcatatgtgcaggtttagtactgccaacagtttttcaaagtgggtgaaaccatatcacactctcaccagcagtgtctatttttaaaaaaataacttcatataagtgaaatttgaataaaagagtaaattcattttaagttttggaatatagtgctggatttgtcctcagaagtactaattcgtactccactgaacactagattttatccagctctttcgttgttttcattgtttatagtgaagaaatatctttttaaacttctttaatgaattggacttttttatacttcagttttacccatttccgttttcttgacttggatgttctggctttttctttgttggggtatttgtatttttttcttgctgctttgtaataacttatttttaaaatccacatttttgtcttcctagtttatcatttgtcttttacactatggaagtgttttccatgtctgttttctttaagggctgtattgttgatatttaattttattttaactggatttgcctttttttacgtgacacaaggatgctttttttaaaaaagttttaaaacattttaagcatgttatgcttttacttattacattaacgttaactttggaatattttgcaggatgtcagagggtgactggtcagagtaggcatgcatgtgtcatttgaccaagcaagaaataaagccagttttcctatgtggacagtattgaatcattttagtgtgcaygtttctaaggtagtaagttatcgtttagaaaagaattagatcaaattagcctagactgaactatcttatttaaatatctcttgtggatrctcagggctcttgagcaaggactttaccaaaattacacctggcctcttgcagtcagttctgtgtctcattggacacgggcttggagtgccaaatatttaatttcaaatctttaaaaatatttattctctatgagattattaaaactttttaaatgtttctgttttgtattaacagtatataatttgcactgctgatggagaaatatgagaccaatctattgtgttttcctttttaatgttacagtgggatttgagagcttcccaaagcctctgtcacctaaaattcctactgagaatcatttttggattttaccgcaaagcagatacatagaacagattttaaacgagtagtcctctcttctaatatgaattaatttggtttctagaattgaatcttagcaccttaaaggggcaagaatctcaggggtaggtaagttttagaggaagggagcacagccatgttacccctctgtgattagagccctggagcataccaaaccttgaggcaagtctgaagaaggtggagtttggggggcagtgaaaacagatgctatggataagatctgaaaaaatttttttttgttttgttggtcttttgcatttggcagtactgcttgtggcaaggttgtatcattaactgtgttgattattccataagccaaggagacaattgtgggaactctccttagtaaatccctcgttttaggagcatagcatttccagtttaggggaatttgtattttgstgaacatttgaatttgactaaagggaatactgggtttatatgacaggctcattagggatagattgaggaggagagggtagaaagggagagaaaagctaaaattaagcgcctatttttcatgtatattttttattttatttttgagactgagtctcaccctatcacccaggctggagtgcagtgatgtgatctcggctcactgcaacctccacctcccaacttcaagcaattcttttgcctcggcctcctgagtagctgggactacaggcatgcatcaccatgcctgggtaatttttgtattttttagtagagatggggtttcaccatataggccacgctggtctcgaactcctgacctcaggtgatccacccgcctaggcctcycaaactgttgggattacaggcgtgagccgctgcgtctggccagttttttatgtatataggcaaaatgcagtcttacacattttacatgtttaacctgtctaatcctcacagaaatcctatgaaatgctgttttcccaatttgcaaagagaaaacaaagactcagggagtaaactgacattattttggctaggctcaaaaactcagtaaatggcattcctgggatttgaacggccgtctctgaatccaaagctcatgcatatcttcttacaagagtatatattgcctcctcctaaactaccagaattattatgtatattttatcaatgtcatgccaaattttggtaacactttaagtggcatatgcctggggtgttattggtaattctgccagatactgtaaagcctgtgtaatttcctttaccgtccaccttagcatcgagagtaaacatgaggttacgatcctgggaggacttaatgaatttgtagtgaagttttatggaccacaaggaagtaagtacatgtgttggtatgtgttcttctattacagtcttttacyctgtttcttaatagaatatcaaagacagatggtagcatgcgtagtttctgaaaagcaagtttagttggactgcagaaccagtgaggaaatctttctcttatcacaatcactttatatacagtcatcccttgatatctgtaggggattggttccaggaccacctcataccaaaatccacagatgctcaagtccctttataagatgacatagaatttgcatgtaacctacacacatcctcccatgtcctttaaatcacatctagattacttgtaatagctaacacaacgcaaatgttatgtaaatagttgttatactgtattttatttatttatttatttattaagtgatggagtctcactctgtcacccaggctggagtgcagtggcacgattgtggcttaccgtaacctccacttcctgggttcaagcaattcttctgcctcagccttcgaagtagctgggactataggtgcctgccaccacgcccagctcatttctgtattttagtagagacagggtttcaccatgttggccaggctggtctcgcactcctgacctcaggtgatccacccgcctcagcctcccaaagtgctgggattacaggcatgagccccaccgcacttgtcctttttggtattttttttgtgttatttttaattgtattgttatttattattgtttggatttttttctctaatatttttgatctgtggttggttgaatccaggggtgtggaacctgcagatatagagggctgactgtagttttctctttatctctatgtgacagtactagacatgaattgtaaattctgggttttgttatggatggccacgtgaatggtttccaggaaatgttttttgttgttttctttttggccttggaggggggatgaatatggggtttattgagataggagggaaagtaacatggctattacttaccaaataattgaatagtgtttagtacttttgaagaatcaagtaaattgcagaatgaatctgcttattttttaactctggatctttccaagaaaagtatcttaatctgaacgtggtacacctattgattgtagtaggtccctgactcttgaaggaattaatttggaaggttttcagaagattaggggataatrtttaatttacactcagatttattttctaatttggagatgtagttctgatgaacatttttacttttatttcagcaccatatgaaggcggagtatggaaagttagagtggacctacctgataaataccctttcaaatctccatctataggtatgttactacttggtttttctccttagagagttttgaaatctaagggggaaaaatcttacatttcaggggaggtaattaatgccagaaatggctgtctaattgaatttttccttttttggctttggttaattaatcagtgacttttggggggaacttctatagtgtgttagaagacgtttaaatatactctttgcataattataatgaccattactttagatttttgtcttttggtgtcagattaaaccagctttaaggycccactgttctttaagctgttagcaggaaaataataaacatatcttaagtctaattttgaatgccagattgcaagaatgaatgttacatagtatgtgttttaatcctatcattttcagaaattctccctagatcctactttgcttttttgttcactccaactctgggtaccttacaattaaatgaccctttgcagtcttcccacctccagtctctttagccccctaaacagcagaagaaagaatagaaacctcagtggggttgtacaaagaggtactttctcctcaccttcatctccttttaccttaatgggtgatgttatttacctgtcacccccattgaggcactcagtgacagatctatctgattgaaggtggacacctttaaatatttggagactgtagaatggtagtaatttagttaatttaagccagcttttttttttttttgcttcactttatacatgtctaaaatattataaaatattgaacaattttaagtaagaacaataaaattgtaatatattgagcattctctgagaatcagactaagcctcatgttcagaattgccagagttcaaacattttgctactgctgtgggctttttttttttttttttttttttgagacggagtctcactctgtcgcccaggctggagtgcagtggcacgatctcgactcactgcaaggtccgcctcctgggttcacgccattcttctgcctcagcctcccgagtagctggcactacaggtgcctgccaccacacccggctaattttttgtatttttagtagagacggggttccactgtgttagccaggatggtcttgatctcctgacctcgtgatccgccagcctcggcctcccaaagtgctggaattacaggcgtgagccattgcgcctggctgctgtgggctgtcttaagaagtaatgcccgatatcctggagtctagaccactccccactacacccccactcctaaccagttgaatcagaaatttctttcttgctataggggcctctaagtttcagcgttgtgaatggtaaagtgggagtggagctgtgaggtgttgagcctttgagacagcccccgagcacatctgacttagcacctgtataggtgtagaaacgtatacgcctgtacaccttctccttttgagagggcttttctgttgtgttgtggttccctgtccccagtttattcatcttctaactttagggtgtttctgtytactcagccatttaaaactcttatgttggttagtgataggactttaaagcctttatagaagtccatgcaagttcattcagatacatttcataaatacctgtttacctaaaggctaaaaactggcatgctaagtctagttttgttaaccccacattcctagtcagaaaggaaacaatagagcttgttgaaactaagagtgaacttayagaaatgcaatttcatatcctgtagaaatgttatttctcagaccttaatgtatttttctagataatatgattatctcatcataactttctaggtaataatgtctaaactttaggcattgcttgtttattaactaatgacacaaaaagcctccacgctttcttaaattaatgatgcaatatgaaatttggttgggacaaatgactaagctaatttaacttcttcataattgtttcttttgcctttctgtgtgctttcaggacttgataatgcctacaaatgtgtatcatcttctgtttggaaagtagatttagctgaaatatttgtacaagctgttcttgtttcctctagaggaaggttgcataagagagtttcaatcagttgtgcggggtgacccattttcaggtcatcaacagtgtaattactgttgagatgtgctttaagcattcagaaaggttgtggctcacttagaaaaggcaaggattcctttttgagttgtgtagatagttgtaaaattatacagaagggcgaggaggtaagatcaacccaatctcaacattctttttaaatcttgcccctgttgtatctgggtaggtgtagtgttcttcctgagccaaattttgagcttttaaacaatcagctgtgcaaatttagatcaaacatctttaatgcttggctcttggaattttgcagtgtctatgtactttgttctattttgtgtgtttgtgtatggatgtgtattttaattgtataaatgacccatatccattagagcaatgtaagaaaatctgtaagccaaagtaaagaaaaatcaaaatgtctcataatcttatcccttaaagggtgtcattatttacattctggaatatgctctttaagacatttctctctgaatatttaaatatatatattcaatataatgtgatatgcttatctttgggacactctccaaatatagttttagagggctgtcagtagttacatgattgcatgagatgtccctttaaaacaatttgcatctataaatgagtgggtattcraaatagtggcatagctactttttggaaagaaaaggaatataggtagacaccttgggaggttatgaacttattcttatgatgccattattgtttcaaacactttgagctcttttttttggaattttacttctgtttcagtatcataagtgatggcaaatcttgatgctttgaagctggatgtgaatttttgaaatggctaacagtcatttaagcccaaagaataagatgaatggaaaaacgagtaatatcaattggggtataaaaccggccctctaggcactttgaaaagagtaaaagatataaaactcctttaatcaactataacatcgctgaatatttgcataattttccagagagactgctttgagatgaatcatatttgaatctttttctgatttacttgaaaattcagactttcatatttttcattcagaaacattagttcctagagtgcttagcaatactgctgggtgttactgtgtaggagttaggagagtgtgattggtcagtggactggttatcagggtagagaagttctggccctggttctccttgaccatgagagagatatgcagctgacccattgttttctctgctagaaaatgagatactagaattaaacagattctgcatgtttgatatgaccagtgtattaaaactcggggtacctggcatcctgctggacatgacgaaggctacagaagatctttactggttaggagagaagaagaatgtaaataaaatactacgtgtacttaatggcatggttccattgttttttaggagaggtgtgagtcagcacctcaatttagaagagagagcgtaaggaagacataagtttctacaagagagattgtcttcacaaaagcttcagagttgttgaggtgtgcatgaggactttagagatactcattcagaaccccaagtaatccccagttcatgaagattttgttttatgcaaagaaattgctgcagagactgccatagctcacacttctcgaggttcacagtttttagcctttgatacttgtgctcagctgttaagtgaaagctttcaccaaacagacttgcagttacagtgtgggtgaaataaagatgaatgatctcatagaagagggtaatacagagtaatttttaataaaaaaaaataagcagaggatacaaaatggttttatgtctaatccaaaagaatgcagattaaaacgaaagtacagtatatgatttgtcaaactggcagataaaacagtgttrgaaaaggtattatgatacagccagtctaccactatgtattgcttggtaaatattttatatccttcaaataattttatttaaaaagttaaaaattatctaaagaaatatttagaaatgtgcactgtcaaaagaatacgtaaattttagtgttataatacttaaaagtcagaagcaacctaaatgacccagtcggtgataaagtagctaagtgatagtgcatcttagtggataaaatgttttacccattagtcatgttttaacacctctttgaagggacacacaggaaaatgttttttatatagtacaactctaattttttcctatacatttcacatttgaatgccaaactattgatgttatccatagctgttcagttaaaggagactaaaaacatacttttctgtaatttccaaatagtctacaatgtttgcttttattataaaagtaaatatttttaatcatattgcaaatgtatgtcttttgactgtcctgtctgtatcattgtctgagtctacactttgctgtcttttgctctagaaagccatcagssttggccagaattccctgtggtagcttgctcaggacctgcctaacccacgtgtttcccagcagcctcccttcttttttcctttaaattttaattatgtgtgtgtataagtgcacacactgttttccttcctttgttttctgcttagagtttagagtttagtccatctcagatactgtctttacgcgcaactttcttcacttctttcttccccctttttctcttctcttgggtggttacctcaagtacttctcacctttttcttttctgcctgactcttccacttcccccttccgttgttgcatttttctcttcatatgaactgaaaaatgcccctctttagagctaataatcataatggggatacttttgataagcctaagccaagggaaaaaaaatataaaagtcttctaataaaagatacagggccgggtgtggtggctcacgccagtaatcccaacactttgggaggccgaggcgggtggatcatgacctcaggagattgagaccatcctggctaacacagtgaaaccccgtctctactaaaaatacaaaaaattagctgggcgtggtggcgggcacctgtagtcccagctactcaggaggctgaggcaggagaatggcgtgaacctaggaggcgtagcctgcagggagccaagatcgtgccactgcactccagcctgggcaacagagcgagactctgtctcaaaaaaaaaaaaaaaattatatatataaaaaaaattaaattcagggcttatagccactaaagatcttgcaacatccagaagttctcttctggatctattatattctccttcatatcatatctactttacttaaacactagcattccagataaaattaagatgtcattttatcttacatttaaatgattattggctactattaacagaattgtatcctaatttcagatagaactatagaatattttagaatcttttgtaaataactttaagagcagcctaggaaccctgtcatcatttatacttcttaaaaattagaaaactgtgttataaggtacaggtaacaagttkagaaaccaatttgtgaaatgctaccgatctatatctacatattttcagtgaggaggaccctctactaggagcaggctgtatgcattgcctctgggttgcaatttgatgataccaaagctgggaaggtaagagaaatggttgagaacaggattctggagggactgctgaatggtttgctgaatgttggtagaatggtcaggtacaaaaccagcaagctcgtgctgccatagaacttgatgtgaggccgagcgcagtggctcatcctgtaatcccagcattttggggaggccgaagtgggcacatcactggagacaaggggtttgagaccaccctgagcaatatggagaaaccccatctctaaaaaaaaaaatacaaaaattagctgggcatggtggtgtatacctttagttccagctactcgggaggctgaggtgggagaatcacttgagcccaggaggcagaggttgcagtgtgctgagatagcatcactgcactccagcctgggtgacagagtgaaaccggtctcaagaaattaaaaaaaaaaaaaaaaaaaagaatttgatgttagtggcatgaagcaagaacttgccaaacccatttgagtaaatggagacaaaatgaaaaagtcatgggcaatacaatagttaaaatactctgagctggctgggcgtggtggctcatgcctgtaatcccagcactttgggaggctgaggcgggtggatcacgaggtcaggagatcgagaccatcctggctaacacagtgaaatgctgtctctactaaaaaatacaaaaaattagctgggcatggtggygggcgcctgtattcccagctacttgggaggctaaggcaggagaatggcrtgaacccgggaggcggagcttgcatgagccaagatcgcgccacggcactccagcctgggcaacagagcgagactcttgtctcaaaaaaaaaaaaaaaactctgagctatattaatggcctttaaaattgggtcaaactatcaggatggtttaggttgccctgttccactagactggacagcctgtcagagttcctcttaaatctcccagtctggcatatactctgataaccagtgtgccataattcttttttttttttttttttttttttttttgagacggagtgttgctctgtcacctaggccagagtgcagtggcagcaccattgcagctaactgcaacctctgcctcccgggttcaagcaattctcctgcctcagcctcctgagtagctgggattacaggcatgctccatcatgccctgctaatttttgtgttttttagtagagacggggtttcaccatgttggccaggctggtcttaaatgcctgacctcaggtgatccacccaccttggcctcccacagtgctgagattacaggcgtgagccaccgcgcccagccaatatatatatatatttttttactcatgcaagtgataaagggaactgcattaatctttttcattgtcagaataatagactgttcaggcattatacattttttatttcactctggccagaaatgacctcacactatttttggagtggaggtttataatatggcatgactaaactacctatagaacttagaatacttaccattttatcttatgtcttcctagatggaatcattctagagttactccctcaagaactagcatgagtaacttcattgagcagtatttaagcagggatgggccagtatttgsagtagagaggagtttgtcattcacaagaggtttcaggttagtcatttaacaaaggcctacttgtaccactgtattttcacaaataaaatgaattctgtgactgggcacgatgactcatgcccgtaataccagcacgttgggaggccgaggcaggaggttcacttgaggccaggagttcgagaccagcctcaccaatatggtgaaaccccrtgtctactaaaaatatatatatataaaaagtagccgggcatggtggcgcgtgcctgtaatcccagctactcgagagacggaggaaggagaattacttgaacccaggaggcagaggttgcagtgagctgagatggcgctgctacactccagcctgggcgacaagagtgagactccgtctcaaataaaatgaattttggggctgrggaggcaaaattccattcagatcacctrtgtacttctctaataaccgtggttatgactttagtcctgtcccaaacagttacataatggctactctgtagtgatctatatcttttttttttttttttgatacagagtcttgttctgttgtgcaggctggagtgcaatggcacaatctcagcttactgcaacctctgccccccgggttcaagtgattctcctgcctcagtctcccgaatagctgggattacaggcatgtgccaacacgccaagctaatttttgtattgtaggagagatggggtttcaccatgttgcccaggctggtgtcgaactcctgacctcaggtgatctgcctgccttggcctcccaaagtgctgggattacaggcgtgagccaacgtgcctggccaatgataagtatcttttgaattccagtagagagaaacaaggttctagtaagtaaggaaggttttgtaaaaaaataaatagagataatgctatgagaatataagccattgttaaaagctcttttactggtgttctgaaaataacatttttcaaaaattatgtctggcagctgaggctttggctgtggcmtacatcatccttccaatcagtttcacaaagttattggatacctactgcgagctgggcgttattctgggtgctgtagatacagaagtgaacaaattgctctcttaatactttatgttcttttggagtgcgaagataaagcaaaatttaaaacttctgatagctttatgcagagaattaatggatagaataggtaccttggatcagatattcaggaagggtctgacaaagtaaatttaagctgagacttaaaaagattaaaaacaaaacaaaacaaaaaccagccctgatcctccaaaatcaggggtaagagctttccaggcagaagaaattttgagtacaaaggccccagcctggaaaactgggtaaaatgtgaggtgtgtgacacacgggccaagtggcaggcagggttgagttcacagaccgctttgtaggccaggttaaaggctcgactttcattttaaatgtaatagaaagattacatagttttcagcaggggagtgaaaggtctgattttgtttttttaatgatcattctactgctgtggggcaagacacagtgacgggatagaagcacagttataaaagcttttgtagccggagatgctggtggcttggacaaggctgccaaggtcaagaaactttgttctagacatacaccgmtstgaagacatgtggctccattaaggaaatcatccaagctggactgcagtggcataatcgtggctcactgcagcttggacctcctggactccaggcatgggccaccacgcttggctawtttttttgcattttttgtagccatgggtttcaccatgttgctctggctggtcttgaactcctatactcaagcgatctgcccacattggcctcccaatgtgctgggacagcaggtgtgagccaccatgcctggcctgtttttaatttttaaatggaagattctgaaggattttaaagtgcttattgtagagagatgtttagaaaagggagagcttggtgatgctggagttgggaagagaattgcaggagcaccaccatcgagaaggaaggagggagcaggatcagaacccagaggcctggtgtttgagaagaggggaacatgtgtgcaagctgttgaggcagggagaaagagtatgtgtgcagggaggagtttagaaatttttatggaaaatgaagaatcctgccaattggctttcatcttctcaaagaaaagggacaaggctatttagtgaaagaactagaggagagagttaggggaacaaagggagagaaagaaagtagatttgcaggattgtggtaaaatgtaacagtcatgggagactgggggagcgacccactagagaaagsggaagggaagattgtaggtgatgctgagtccaagaaaggctgttgagcatgtttagataaactggtatatatttgtttacttatgtctctcctccctgccagctcagtagatgtgaactccatgaaggcagcccctgggtctgttttgctaccaccacccctgtcctcccaaatactcactactcagggcctgatacagtgccctttctgcagaagaatattcgtgtgagtgaatgaatgcctacctactggtaccctcaagtccaagttgagcaaatgtgaatgatgcttcctgtggtagctttgctagatgggcattttggaggggagaggacaggggatttgcagaggattgcttgagagtgaggatggtgatggctcttaaatcttaagctgagtaagaagccagtgaagataagagggctggtagttgggaagaaaatgggagaatctgtggattacagttaacaggtgaaagaattaatgattcctggggtgggaagcttttggcaaggacaggggattggtaggataggagatgtctaaatttgtgattgtggaggtaaatatgtaattgtggagggaatgacaaaggtcagggtatgtcctggggagcatgaagtggaatggaatagaaggtcactgaggagaagcttaagaaacaagccgggcacggtggctcacgtctgtaatcccagcactttgggaggccgaggcaggcggatcacctgaggttaggagttcaagaccagcctgaccaacatagagaaaccccgtctctatactaaaaatacaaaattagctgggcatggtggcacatgcctgtaatcccagctactcaggagactgaggcaggagaatcacttgaaccccggaggcagaagttgcagtgagccgagatcgcgccattgcactccagcctgggcaacaagaatgaaactctgtctccaaaaaaaaaaaaaaaaaagagagagagagagacccgggtgtcaggagtatggtctrtattgtcaccaaaaatgacaggagttggggcagagagcaacttgggggccaagccaggtgctgaagttctcagtgagagaagccagtggtcaaatgggcccttttaatgtgaaacctgctgtgagcaggctgtaatgtctaaattcatttaccttcatcttgttattagccagagtaaaaatagtacagttagctttcccaccccattccccagrctgccacctctaaggataaccctgcttttgcatatgcttgttactatcagaggacttgtccatttctttcttttttttttttttttttttttttttgagacggagtctcgctctgtcgcccaggccggactgcggactgcagtggcgcaatctcggctcactgcaagctccgcttcccgggttcacgccattctcctgcctcagcctcccgagtagctgggactacaggcgcccgccacygcgcctggctaattttttgtatttttagtagagacggggtttcaccttgttagccaggatggtctcgatctcctgacctcatgatccacccgcctcggcctcccaaagtgctgggattacagtccatttctttcttgaagttgacttatgccagttttaattctgcctttgacagctcattattatataatcttttcatttgctatttaaaacttccatcacacttgctgcctaggttagttcctactctgtaytggrtgacctctagcttttgagctggttattctgacatctttttggcattaaatctatttctttccctttaggatttggtgtcataatgaaaacaagtatttttggcttcctttttctttaaactgaaattcttttgaaaacaacaaaagcaatgtcttagttctttttagaaacctgttcacagtttgagatttgcttatattcctggtgttggtgaaaactgtgttgttagtggaagtttagagattatgacatccaatttgcctgattttaaggatggaaaaaaatgaggctgagatgtatgactacgcactagttgcagagtccatcttctggcttccagtttagtgtgtgtgtgcttgttttttaactataccaaatgcagtcaggatgttttttttttttaatctaatttttgcttgcacatcaagaaaggatggtcttcttttttttttttttttttgkttttcttttttttttttttttttattatactctaagttttagggtacatgtgcacattgtgcaggttagttacatatgtatacatgtgccatgctggtgcgctgcacccactaatgtgtcatctagcattaggtatatctcccaatgctatccctcccccctcccccgaccccaccacagtccccagagtgtgatattccccttcctgtgtccatgtgatctcattgttcaattcccacctatgagtgagaatatgcggtgtttggttttttgttcttgcgatagtttactgagaatgatggtttccaatttcatccatgtccctacaaaggatatgaactcatcattttttatggctgcatagtattccatggtgtatatgtgccacattttcttaatccagtctatcattgttggacatttgggttggttccaagtctttgctattgtgaatagtgccgcaataaacatacgtgtgcatgtgtaggatggtcttcttaataataaatatggggcacatgttctcaggacctcctggggctgtgtcacacaaataataaatattaaaaataaaaattataattgtattttccatttctagtgtgacagagttatgggaarcatatgtaaatcataatatcctctcatgttcttcacacttgtaagagcattaagagatggacacatagggtaaatattaatcagttttaggatgaagacagtaagatgaaattacttgttcatttaacttattaagctaattctaacattactgcatgcttactgtatgccagttactgttcaaatgctttacatatattaactcatttaatcttcacgattaatgatgtgtagatwccattatttaacctagttttaggaataagggaacagaaaggcaaagagatgaagtagattgccccagaggctcacacagtggcatttaggcattctgactggagcctggtcctttttaaaaaatgtattgttacatcagttacacacatttttggggtacatgtgctattttggtacatatatgcaatacgtaatgatcaaaacagggtaattgggatatctgtcacctcaaacatttatcttttggagcctgatcttttaactacaactctaagagtggtagagaattgtagttgggtcttgtgagttcaagtccaatgtattctgtactgtattgtctctgaccatgaaaataagtactgcctgaacccaacagtgtggttatatgaacgacccagcgatcgaaagataaactatgaaaacaaaacagaagttagtctcccaaaaatgaaaccaaaggaaagtaggccagaggttttgataatccactaggttggtagaagggttatgctattgaaggataacacttcaccttttcttagttataaatgaccttttcttatccatctagcccattcctcagactctatattaccagagagaaaggaagaaacagaaaagaggaccccttgttgagtttagatctcctgaacacacacaggatcagttcagaagttcccatgacacagggcattgagagtgagctccttgcctggttcctcacccaagaagagacaggcccaggtccatctctcctgagtaggaaaggctcagatttctgaagagatttctacccgggcacaggctgcctcaggtggggcctggctgtctgaggttagatgaaaatctatcagattgtggactcctgcacatagctggccaatgtctgtcactagtggagctggcagcacccccccrcccttactcaattggaacacccctactctggtcaccctgtgtgctaggaacagagatccaagttattacccttaaataatttatagtctgagatactgcaagggaagatgagattcagtctttaataagaatattttaaacaattatacctactgaaaaaatagaattaatcagtttggttgtgaacagtctactttatgtgggcagttgttctgaagatagacgatcagaatgacttaatgtattcacttaactgttttctcacaggaattcataagcttataatgcaattgcatcagccacagctgtctgaaccaccttagcctaggcttattttatccctgggatgtagctgctgttttggcctttggtgatcttcacccgtttaccgtagggtggatttaccttgattcacaagtcgtttgtctaacctctccttttgtcaagataattctgacaggtgaaatttctggtgattggcccaaagtatttcatctacccacaaatttgatcattaatatcctctcaaataaagggaacaaagatggaaaaataggtgaagcttggcctcatttatttacatattgaccccaatgtcagaagttactcagaagtgtgtgcaactctgtatagaccccttcctggractggacacagaggctgaaataaaaaccagtttttcagcatgacttagcacaatgttatttattttcactgcctattagcctatgggtcatgagatttgttattctagagcagytgagtattggagtggaacaagcaaaagcaaggcatatttttctgttgtaatctgtactttttattttttaagatatataataatagttttacattaagtgtgatttggattccttctccagaattataaattacctaattcccttctgctaaaagaygcasgacagagaagggtaagcattttagctggacatttattcctgttgtacgatcctccccatcccctttaacgagtgctagaactacgccagagaataactgtccaaaaaacttaaggagttctgattttaatctggtcaaatcactgaaatatgttgttagaaaatgtctggtagtggccgggcacggtggctcactcctgtaatcccagcactttggtaggctgaggtgggtggatcacgaggtcaggagatcaagacgatcctggctaacatggtgaaaccccatctctactaaaaatacaaaaaaattagctgggtgtggtggtgggcacctgtagtcccagctacttgagaggctgaggcaggagaatagcttgaacccgtgaggtggaggctgcagtgagccgagatcgccactgcactccagcctgagtgatagagtgagattctgtctcaaaaaaaaaaaaaaaaaaagaaagaaaagaaaaagaaaatgcctggtagtgaataaaatcttaaatcatgaagattaaaaataacctgctacttctacttatgttgccataaaagcagttttcaaaatatgttctcttaaaatatcttgaaaatagttcctggtctaatggaaacaagtgttgggaaaattcccttgttgcagacatattcattaatgtgatgatagcattgccaaaaggaaggagaacatgccagggccaactcaacacagtcctgagaacattccttttccgaatttctggcccgttctttctctgtctcccccctccttgtccaggagttccattgttggcatcattatccagaatgtaaatggctttgccagaaacactgcccacagcttgtctaagaacaaatgtcaaggagatatgcttttttccatgtatttgctttggatatttttctaacaattaagcctgagggccaggtgcagtggctcacgcctgtaattccccacacttttggaggctgaggtgggtggatcacttgaggtcaggagttcaagaccagcctggccaacatggtgaaaccctatctctacgaaaaaatacaaaaattagctggttgtggtaatcccagctacttgggaggctgaggcaggagaatctcttgaacccrggaggcggaggttgcagtgagcaaggtgctgcaccaccacactcctgcctgggtgacgaagtgaccttatctcaaaaaaaaaaaaaaacacctagtattggaagagatcattttagtttagaaagtagaaagtttcttgatagagttggtctggttgtgttcatccctcaaaggcaaggttataaactgtttctgcctactttagaagagtcagagggtttgttttgtggctctttatggtattttatcatgttggtggttttgtattctctagaaaatttctgtacctaaaaatgctgccttacagaattaatttcctttaaggacttaactcttggatatttccccataattcctctgttctcagagtgcttgccattgttattaaatgctagatttttagagctgatagggccttcagaaatagagtaagagtggagatttgggagatcatatagttcaactatttgtcttcgtaggtaaagaaacagaccccacaaggtgaagtgacttgcccagggcctgcagttgattagttgaggctagaacccatgtccctgtttagtactttgctttgtggtgtgattctgccctctgtactagtgctcagatggtgttctgtacttagcaggggcactggagactgagctccaaaccatttattactaaagcgtatgtttaccaagtcctttttggttctgttatttattcctgtactcaactaagccaaatctagatttaattgaaaactgtatagacactgttaattccaagtgtgctctccaggtcatgtccaatgagggaggcaccttagtctttcagagacgttttgataaacatttaaagcttaccatagttatttgcttgacttaacacctttaaatgccccgtggcctcagatcgttgaagcataatgccctgtaggattcccattttgttttgcttgagatctgccattccccagcactcaggtgctgtgagctgattgagctgttccccaactagcctattttaggacacaagccatttgttaagccaagtatgtgaatatgtcactgttcaggcactagtctcagtggcccccccatctcccttgaataaaagccagtgtccttaaaagggccccaaatgctgatcacctctgtgacatcacttctcattttctgcccctttttcaaatcccttcagtttcaggaaaaaacttcagagcatcaggcaagctcctaatgtgctttgcacttggctgttccctctatagtgaccttctcctctcctyttggtaccaggtggctcctctttcacctccttcaaagcaagtcactttctcaggaagtcccttcctgaccatctcatttaaaattgccaccccgccccaacctttccatttctgttttcctcctttgctgtgtttttctccataatgctggtgaccttctaatgtaggacttattttttctaaagacctytccttacaggtatttccccttaagtcctgtgtctttgagtattggttttagtttaaatgaaaacttcccagtgcttctcatctgtagccagcattgggaacctttgccatagacgttgcttcattaggtgttagttttgagagttctcacagaggcaggattttaagtatcaagaacgtatttttaattcttaatagtagcttcaggcaatatttttcatatagtaggaccattctcttgcattaaaccacatagtggctcagcattgttccccactcatcagaaagcttccctgcagtagtgatagcagcatactcctatatataactgatcttgaggaccacgtaccttataacctgaggttcctctgattttagggggagggtaatgaatttgtattatttgaacaagagtgttaagatacgagatttcaaataaaatggttggttttactggctttttcttaaaatagttcagcactagttaatgcttgtgtaattcagtctattttagaatgtttgatactatgtataactttttttggaaacggagtctagctctggcttccaggctggagtgcagtggcatgatctcggctcactgcagccacctcccaggttcaagcaattctcctgcctcagcctcctgagtagctgggactacaggtgggcgccacatgcccggctaatttttgtattttcgttacagatggggtttcaccatgttggccaggctggtctcaaactcctgacatcaagtaatccgtccgtcttagcatcccaaagtgttgggattacgggcgagagccactgtggccagctgatactatgataactttttatttcggagtttttttaagctcaactattaaaattacacattgtagaaatgtcagagagccaaaagtgcaagtagaaataatgggagaatcttgcaaacatgacaaccatccacacctgttttcttctagccttttcccattgctgtgatcctagttctggttcaggtgtggtgaggtggtgatgagatttgaaaagtgcagcggagaaaatactaccaccactaagaattctacactgttaacatttgtacttactttcagtttcttatttatgtgcatatgttttaaacagagcaaataatatagaagcacattgtccctttttaaaaggaatatattaatagtgttaaagtctttttttttttttaaagacagtctcactccgtcacccaggctggagtgcagtggcgtgatcttggctcactgcaagctccgcctcctgggttcaagtgattctctacctcggtctcccgagtagctgggactacaggcacacgccaccacactcagctaattttttatttctttttactagagacagggtttcaccatgttggccaggctggtcttgaactcctgacctcaggtgatccacccaccttggcctcccaaagtgctgggattacatgcatgagccaccgtgcctggccagataaagtcatttttaaccactgtttcctcttctgttcccttttcctatcatgaccctggccctgtgccctaactgaaacaattacttttgcaaatttggtatatgttggttcagtacagttttcctatacttgttaccatggagaattggtagttgtttgttttagtttatttaaataacctcagcctgtaaatataacatcctgcaacttaaaaaaaaaaaacaaaactcagctttagatgtatacaagttgatacacatggatctacttcattacccttggctgtataggactcaggtagatggatgtactcccctttatccaaccctatcccattgacagggttgaatttggctgttggcttttataaataatattgcaacaaatactctcatggggcatctgggacatgtgtattagtatttttctaaagttaatgtagaatgttttttaccctaatttttctcctcttaataccaagacatgaacatttcccattattaaaatgtcttcataaaccacatgcttcttaaatctagactttgaaacatctttaatttccttaatgaaaaattaatattggacacaaagattttttttcatcagagtaacttaaacatcacataggccctcttgattgtagtagatagaacattatgctgtttcaacacagagcatttaaaaacaaaagttaaaagtgtgagtgactagagtggtctaagactggactacttggacttggtattcttatcccctgttttctacttcaggggaagtttctcaggtttttggagacaatctctgtagcgcctcacttgaggctcctcctccagtgccatttctctgcatctttcctgactcttcccrttttactccgcctactgtatcartactttattcagattgcaggtatttattggtgtctcttgtcccactgccacagtgacctcctcaagaatagtgaactgtcttatttttataccctatccaagcacaatgcctgcggtgtaggtgctgaccaaatatgttctgaatgaatrwgagagagagagactgtggggatgggggtgatggaggatgggggtcggagatagtggtggtgatactcaccttaataaggaacttcagatattgaaagtgtggaacagaatgagtcctaaaaggaaatgaagtgataaggatgacaaaatgacacctttgacaatggatctctgctttagaatattgccatttgcatatatactgactgactgaataactggttttattaatttctccttgaagttcaaatggccatatagctattaaagtgtgtacttggtttgctaggaaaaattttaaaaacttaaacctccaacagatatagccaacttagagtattttttttaactccttgcttggttgccccaattttaatcaaaactgggtttccctgaatgagtagactaatgttaaaggaaatattttggtcactgcttttaggaaatcctttgtggtttgaagtggtattcctttagcatttcaacagtttcattcatgttccgtgcacagtgcagccaagtgataccagtaagtgagcgtcagaaggagaagttgaaatgcagaacctccagatttagagcttgaacaacaaaacttctgggagagtgaagtttcttaacttttatcatgacactggctatgaaccatttagtagtataatttatctttgagcagtaccttcatagctcagaaaacagttgctttaatgattgttttgtataagaagctgcatttctcccagtttgctcatttgttaatagaatgctgatgtattccaaataattggagctatcaggagaatataatgtttatcagtaatgaaagatctaaggttgaaagtagtgatttataagtattatcaccttttcccaatactgaaattgtttccagtactgaaatacttttattgttctctggatactttttgctgctaattaacatctctttttacaggattcatgaataaaattttccatcccaacattgatgaagcgtaagtaactattttaaaatgtttcaattttagcagcaactgctcatgattagtgtttctctgtgttataaaaagcctcgrttatctttttggaccttatcaggaggtaggactgtatgaatggtcatgtaaatgatagaatccaaaggatatgaggttctcaatcacttagttcacattctgctgttgtaccacttatttttttccattgtcgtgactgggtccttcatttttcttgttayccagcaaacagtagtaatattccacatctcacttctctttttgtagacacagttcagagatctgttttcagcctacagatagactattttcagatcttataatattttctcaattcttgatagatagtaaggcaaaatgactatagtttcatttcagttaatgaatcttatttatccccttctttccttctaatattttattaatgatactttaaaatattccagcatatcctgttttatacttctagtgctgtttagaatatattattgtttgggatgcaattttaatttgtcatggcactaagttttactgtctctcacaaacatacctaacaggtttttctgcactctgtgtgagtaggttgtatatatacatacatcatgccccttagtcctttaatattaatattttattgtatcagttatcctaacaaggatattctcttatctatccacagtatatagttgtcagattcaggaatttaacgttaatgcaatacttatttaatctactgccatattccagtaacttactttttagcacttttttctttcaataaaggatccagtctagaatcacacattacatttagttgtcatgtttctttaaactgctttaatcaggattagttcctcagcctgcctttatcttttataaaattcactttttaaaataacatagaccagttattttatagattgttcctcaatttgtgtttgtctgatgtttcctgatcattagattcagggcatgaacacacttaaggccagaaaactacaaagtaagatggtgtccttcttggggtatcacattcagasacacacaaggtctgtctgccccttgtgttctcagcacctggttcaggtgttgtctggtttctccattgcatagttactattttcccctttcagtctgtaaggtgacacttcaagacctggtactattctgttcctcatcatacttttccccaattgggattctttttttcacagatctattanaagtatttctcttgataagtaaaaattagttgccagatacatgcaactaactttctaatttttaaaaacatgccattctttccatctgtttcaggtcaggaactgtgtgtctagatgtaattaatcaaacttggacagctctctatggtgagtttggccatggaatattttttggagatgttgagacattgcctaaaaaaatgttgtttggcttttcttttctggtttaagatgttttgttggtaatgggaagggatttttgagggaccgactgggaaagtttgatcagtggaaaaaatgttttctcttaagtacaaatatatcagtttagctgtggaagtttaaaatgattttttgagattccaaacttaaggtatagtgatacatgtgcacacacatgagtacatgcgcacacacatgaatacatgtgcaaacattttatatgtatgtattagcacataatatatacatattttggttttggaaaaaactaaaactacttaggaatgtccctctgaaatgagagagcaatgatatagtaagaggttttaggggatcatcttttcaaagaccaaaacctccttatgaaggaagagtaatttagccttaccttcagtgctgaaattgacaccccatctcttacagggaatcaacaaatgaattgcccagctctgcaaaatgctatgctgaatatcccagagagttataaagagcatcaggcctttcctccttatcacctggttggggagctgaaaatatgttaaaatacagtcatctcttggtatctgcaggggatcagttcccagaccacctgcagataccaaaattcatgcttactcaagtcccacagtcatccctgtgaaacccactgacatggagggctagctgtatttattgaaaaccacatgtgaatggacccatgcagttcaaactgtgtgtggacccatgttgttcaagggtcagttgtgtatttgaagttaattagggatacaacaaataaatctgtttttccctccacatgtccaaatctcaggcttcatagagtctacctactccagtgctcctaccccgtatacttccgctgattctccagctggaagtaatctctggataccattacattttatagctccttttttatggtccacttttactttctactgtgtatttgttgtttatgcctatttttttgtgctactagattatttcctatcttaagggctatcgggtgtgtgtctgattcatctgtaaggcccaggactcttatcacagtgcccttcaccagtatgggttgaaagaatgaatggtacaggtaaccattgctgagaggcacaagaaaagaagggaaagctcagttgaggctgagcttaaccagggatggctgcttcttgttgaacttgtacgaccttttagtggtctgaggtaggtaagacttcttagtccagccacaatctgcaagttacttttgccagatatccttgaactagattggtaaatgagaatcacagagaaaggttggtcaccagcagaacacagttaatccctgcctccacctgattgtgccgttcaaaaattattttctctacctgggatattcccccctgatctttgtgtggttagcaccttcttcactcatctcacatattacttcctcagagcagtttcctttcccagctactccatctgaaatcacacccctccatagcacagcacccagttgtatatatattttttaattttaaaattattttttaatacatagaaacagagttgcactctgttgcccaggctggaatgcagtgktgcgataatagctcactgcagccttgagctcctaggctcgaacagtcctcccatctcagcctccccagtagctgggactataggtgcatactaccatgcctggctagtaccccgttttcaataagcttctaaaactggtatttgtatattatttatcttatccccttggattgtaagcaccatgagtgaggactttgtcttgttctcgtctctctctctctatacacacgcacacgcacacgtgactgtaacagtgcctggtgcacaataagggttcgactatttgttgtcttaatgagtgaattaatcatgtccagaactgtttaacaagagagttttaggggagatgatggcatatagttgaggcaacaagaaagaacatacactccgagcttgattaaatggattccttttaagatggtttttttggtaaaaatgtctcatggcaggctgcctggaatatctgatgtaatgatgtgttttcttaaactacattcacatcttaaaaatgtacatatcaaaatactgcaatctggttccaattacaatgaagtaaattgatgtttagttttgctaaagcttttaccattgaccagaaaagctttgtgaaagatgtttgctgactgtcaagtacttcatgtctcagaacaggttttttaaaaaaataacagtttcactgaattataattcacagacatgcaaatcacccatttaaagtgtgtaattcagtagtttttaatacattcagttatatgcagccatcaccacagtcaattttagaacattttcatcacctcaaaaataaatgtgtaccctttaactattcgccctaggcaaccacgaatctgctttttgtttctgtggatttgtcttttctggacacttcttagaaacgtaattatataatatgtgrtcttttgtgactgttttttttttcactttgcataatgttttcaaggttgatccgtgttgcatgtatcggaakttcttatggctgaataatatttcattgtgtagataaaccacattatttgtcagataatagacatttgggttattgctgtcttttggctattatgagtgttataaatatttgtgcacaagtatttgtgtagacatgtttgcatttctcttgggtatatacctaggagtgaaattgctggataatatgtttaactatttgaggactgatagactactttgtaaagtggccaacatgagtaagttttcatcacatttataaaatgttagtgtacttacattagcttgcaaagcatttaataagcagcaagagttaaaccacgttggtccaagtgaactgaaagcagacttctgtgttacatgtgtatgagttactgaacatgttccataatacaggagtgtgagcacactaacaggtaagtgcaggaaaacaagaagaaatattttcagagtatagtcaaaagtacactgagcatgggagaattgttttgacattttgctcaaaactatttctgaagaaaattcaacatttctttcacggaaagttttaggaacaggtaaatacaattatataaagtactggtagaatatgttcgttcagatgaccttgaagtgttttttcagacttatctgaacttgagatctgaactgaatttttattagaaactgttaaagcctctggcattgaaggttagttcataattggtgagttctgaatcacttcatttcctgcagtggttcctgagagaatcttagttcaaaggactgcccccgccaacccctgcccygccaaaaaaaaaaaaaaaaaaaaaactaacactaaataactaataggagaaagttggcgtgtcaacataaatattcaactgaaaagcaaaaggctaagcctggcacctaaaacttgtttcaacactttcctctgctgtagattcgatgagggagcagggagtggattgtgaaatttcctgccatttaccttgccccaggacatgtactgttctgtgggtatacatatttgtagcgtaacaacaattcacagttgaaatttcagatgtatgttaatcatagcctgatattaaacaacattcatgttagcagtaaatttagtcctctgtcccctcacacccttccccgccattgatttctggtaagccagttgactcattgcttctgttcttatcctgttttctctttgccaagtgtatgtgcaatttgtttattcagagttcaaaattggtataattgtggtttactcacccagtaatttttaattttgtattatttaaccttacaagagagctaattatagtgaggaatcggattaattttgtaagatgcttgccatcagtatgaagttatcaagtatgaagttatctattgttattgttatgacattaaacagaaagtagcagatgaccaaagtgattttggcttcctgcatgatagcatctttttttttgcatcccttcctgctcttccagacagcagtgacagaagctctgagaaacataaaatgtagccaaggggatctggatttccatttcaaaacaaattaattttaaggactgataggagagttcattaagccacaggtagctttttaagcactcttctattttccagttttcctttttttctccaaaatatattttatctgtagttggcttatcaccctgcactcctgggggcccaggtgccttcactgcgatacagctttaatctctctctcatcccacccttctggaccaggcatgcttgatccctgcaaatgtgtttctctctccagctttcattttactcattctttgactgccttcgtaaattatttatatgatggattaagttgtaggctgggcacggtggctcatgcctgtaatcccagcactttgggaggacaaggcaggcggatcaccttaggtcgggagttcgagaccagccataaccaacatggagaaaccccatctttattaaaaatacaaaattagccaggcgtggtggcgcatacctgtaattccagctactcggacagctgaggcaggagaattgcttgaacccgggaggcggaggttgcagtgagcccagattgcaccattgcactccagcctgggcaataagagcaaaactccatctcaaaaaaacaaacaaaaaaaaaagttgtggagaagtgaggtggaagacaattttcttatgaaattgggcagtttacattttcactcttagggttgctagccagtggactagatacttctactcttattttgctggagagaaaaatcaacatttgggaaaagtcttcccctagagttatctggggagttagtaacaggcaaataaaattgactacaacagaaggaatacttcaaggactttgagattaggcaagagatacaaatttttttttttttttgagacggagtctcgctctgtcgcccaggctggagtgcagtggcacgatctcagttcactgcgagctccgcctcccgggttcacgccattctcctgcctcagcctcccgagtagctgggactacaggcacctaaaatttattttaccaggcatttagaaatttaaaatacaaatttaacacttatcccatccccttttcagttagatagtctgtgaatcttcccaaataattcagattttggcagaaggtatatcttaaaataatgctttatgctggattagtgcatgctgtttcctaaacattttagtgtaactacacagataagaaatacatgtatgtgtctkcatggatgattaattggccaactactatttgaacagcttgagaacttcagtattgatctgtccatgttgaatcacaaacgtcatcctgcctttggaacagctggatgtcattatttgtagatagaggccaagtagagcaattctgtccagtactattgggataatgtcacctgttgtacataataaagaaatgtgctcagttgtggatttgcgcttcaacagtgcttagctagctccgtaaccaaccttctttatctgtctgcttggaaatmttcagatgaggtgtatgtggctcaggagtctaactagttatatacataaaaatggagtcttgctggctttgaacaacttagtggacattcattaaaaataccacactcactggtggtcagctttaaaaccatggggtggtccaggctttttggatcgtgggacatgagccagccagggtatggctctgaaagacagccacagctatgctctactttcgtaggggctctgattttagggcttgtttcattcttgattatatgtaaatgtaaccttgatttgttttatcttcattcacttacgattactgagttataaagtcttcccagcgtatggacacttggcttgtaattgcaggaagttacctcttgttattcttttctgatattaacaactaaattattgtctagtaattacaagcttgaatagcgagttttagtatgacagcaagactatccagctagctaattacacattaactgccctcatttctggaaggttaataacaaatcctattaccatgttttagcttacaagctcttaaggtaagcagggttataaggtttgaacgaggatgaattacctctaaaaaacacccaaatagaygagaattgttttgagattgacaatgcaacaagagcagtgtttttgatgaacaagagcttgttttcttcattgtgatctatgcagtagcacttattttcttctgcaactctctgaagtttaaatatgttggggggaaaggggctacaattaggcaatgaatgggaaattaccttttaagcgggtttggaatgctttaaaaacagtctatgtcctgtaactacacacctcagtttggtggcctggtagcctggccctgagcagaatgtggctggttttcccagtttcagcaccctgcatccatctgtccatctatcttttctcttctcttttctcttctttctttctttctctctctctcctttctctctctctgtccctccccccatcccccttccctctctctctctttctctctctctctctttcttttttgagacagagtcttactctgtcgcccaggctggagtgcagtggcgcaatctcggctcactgtaacctctgccacctgggttcaagcagwtctcctgcctcagcctcccaagtagctgggattacaggcgcctgccaccgcacctggctaattttgtggttttagtagagatagcatttcaccatcttggccatgctggtcttgaactcctgacctcatgatccacctgcctcggcctcccaaagtactgggattacaggcgtgtgccaccacgccaggccagcgccctgcatctttcatattgccctttcccacacagcacaggaacacctgtttctagctttgaatacttaaaaaccaaaatgctactactgagatttaaatgtatttatcatgtatgttgcaaacattctttgagtgtttgaattcctactaattgttatttttttctttttttttgagacaaggtcttgccctgtcacccaggctggagtgcagcgtggctcactgcagcctcaaccttctgggctcaagtgatcctcctgtctcagcctctcaaatagcagagactacaggcatgcaccaccacatcaggctaattttttatttatactagagatgggggtgtcactatgttgtccaggctggtctcgaacccctgggctcaagtgatctgcccacctgggcctcccaaagtgctaggattacagtcatgggccactgcacccagccaccttttttgagaggtgggaggagggaagagtttgktgtgttttttaagcatcccacttcttttcggaggtgttttcacctgtttytgtttttttattttgttttgttttgttgcctgcatggccctcttcattaagactttatcttttaaagatccccatgggctaatatgagaagatatgtgaatctgctgagcttagactttttatatattttctccacacatgagaccctctcagtcaagtaattgtatgaattctttaatataccttttagtatttggtggcgggttatattatcttaattgcagctagttagccttcagtaaactaggtgcagcattgtgagccctgtggccagttgggcctgagccacagcactgcaggaagtctggtgggttgcttcagctctccacctgtgtgccctcaaaacaggtggagaaatgggctttttgtcactgaagttgagttcaaattaattrttttattattttattttattttatttgagatggagtcttgctctgtcactcaggctggagtgcagtggtgcaatcttggctcactgcaacctctgcctcctgggttcaagcgattctcctgcctcagcctcccaagtagctgggattaccggcgcccaccaccaaacccgactaatttttgtatatttagtagagacaggatttcaccatgttggccaggttggtcttgaacccctgacttcaagtgatctgcccgcctcagcctcccaaagtgctgggattacaggcgtgagccactgcgcccggctcaaattagttattttagagaatattacttttaatctcaaaactgtttctttgaattctgcctgcctatccgattggttttactgaagttttccttgaggggctgtctgtcatcttttagggccctctkcaagtttttttcaaaaataacaactgcttagttgtgtgcagtgtaggactctttataggtttttgactactcttcttttcttgtagaatttcactgtcttttaatgtttacagactgcaagcaggataaaattaaaaattcmmccattattaatattgctgctttgtaggagctggtaaaggagtagaaggtaaagatctattaattatagtgtctaatacacccttgaggaaaatctgttaactccaaattattaagtacctaaagaaatctggagatcttaatttatttgccctatttcaggccttaccaaaaaaaaaaaaaaaagctacctggtttttgtgcatatagtagatacccaccaccaccaccaaaaataattgtggaatgaatgagatttcatggttggctttattttgggcacatattgtaaaattcatgacttgcgtggcagttcatgacgaattcaatacagttcctaaagtcaaccaatggaattttgaaaggtcaacagctgcttttctctagtagtcaaggatgtgaataacttgggtgaaattcccaggagtttcaactataatgaccaaaagttcaggggaaagagatctatgtaagtcacagagggaatcatcagttctagacaacaattgacttgtgatttttgtccatgttttcctctaggtgtgaacaggatttttctttcctttcctgtcagccctgttccttattgaattacagaacagataaataccttagacagtagtgactatccctgtgattttcggcttggaaagccaggagtcctcctccagagggagagggatgatgaaagaagtttggatagcatgcttctggaggatgcagaattttgattggcaaataatcattgtacatattcatggggtacatagtgatgtgttttttgttttttgtttttgtttgagacagagtcttgctctgtcgtccaggctggagtgcagcagcgtgatcttggcttaccgcagcctccacctcccgagttcaagcagttctccaggttgcagaattttgattgagggcaagaggaacttattgtttgtgggaaatgacctaagtgattgttttaaggaaactttctctgattacaaaggcgagagtatagagcctttaaggccatttagtagatggctgccctgatccagggctggaatgatatattggttttgacatagttacatgccaggggaaataaaagaaaaactagagacatttctgggaaactgagtgagtacatggaagaaaggaagaacacctagccagattccttccagaggcttggagcctgagagccagggcgttagagtcaacctactcccttcattaggtgaagggaatgggttttcaggaaaataatcttagacatgtaaagtttgataagactacaagactagacatatgaaggaccagttatatggatttggtagttaccaacatagacttcttatttttctttctttcttttttatttaaagagactgggcctcagctgggcatggtagctcacgmctgtaatcccagcactgggaggccaaggcgaagaggatcacttgagccttggagtttgggactagcttgggcaacatagaacttgtctctggaaaaaaaaaaagagagactgggtctcactgtgtcatccaggctggagtgtagtagttgtgatcatagctcactgtaacttcaaactcctgggctctagtgatcctccctccttagcctcctgagtaactgggattacaggtacaagccaccacacccagtagacttattcctttaaaattgtaggatggccaggcgcggtggctcatgcctgtaatcccagcactttgggagtctgaggtggatggatcaccctgagatcaggagttcgagaccagcctggccaacatggcaaaacgctgtctctactaaaaatacaaaaaattagctgggcgtgcacctgtaatccagctactctagagcttgaagcaggagaattgcttgaacccaaaaggcagaggttccagtgagctgagattgtgccactacactccagcctggggagatagagcgagactccagcctggggagatagagcgagactccgtctcaaaaaawaataataataataataataataattataggatgacggcttcccggggtaacagtgtacaaagctaattcttaaaatgcaaatgccacagaatttgagccgctgtgcaggatgctgatgtctttcccgataagttttttgttatttgtttttaacaggatgttgggcttctgggggacaggtagtagaaggagaaaggggatggggtaagtgggattgagaacggaagaatggctttgatggttcttggcacttggcaccacttggtggtggtttctgagttacagcatgtatttttcagtattaagtccgaaaaacaaatgaagaatatttaggtaaaagtctccaaaatgactgcctgtgtgctaattgtggttcccagtgaggcagagcatgtcaaggtttgggtatccacaggattttaacctgcagaaagcagtgtatattacatttttttttgagtggggggtggtagagagagggtcttgctttgtcacccaggctggtatgcagtggcatcacaacatactgcagcctcgacccatccacctgcccctgacttgagcaatcctctcacctcggcaactactgagcacctactctcctgagtagttggaaccacaggcacatgccaccatgcccaattattattattattattattattattattttgtagagaccggatctccctatgttgcccaggctgttattgaactcctgggctcaggccgtcttcctgccttggcctcccaaagtgctaggattacagacatgaaccaccttgcccagcttgaaattttccatttatttcaaaggaaatagaggaaaaagaaataacttgtggtcactggttcataaatagccaagaataaaacatgagatgtgtgattcatcccctcttgtgttttctccttcaagccctgcaccatttcattgtgagtcacctggaatagggcaattttactttaagaattggtacatttttttcagtgtaactctttttaattaatacatattctttaagggatacaggtagctgaaatgtctaccctttgaggatgtcatatttgtattaatagtttagttctctggtgcaatttgaagtatatcttatagtcacttttagtaatgtgtgttacttccctgtaaggaatagcaatgttatacttctccttttgcagtgaagaaattgagatgtagaaaggaagagacctgcccaaggtcaaagagcaaggcagtggaaagcctgagattagacttgtggtcttttagatttttcatctgttgttcaccactgaggagccagctttctgtttgctggagacagttcagcctaatggaattttctctgccagatgtccacattgtgttaggtgatgattctaaccatcctctaatacccattctcctccaaagtggccctttagttcccctccagaacagatctgcttttgactgcctgtggtttggcacacctctgcctagagataacagtggtaacagcagtgtgcagaaaagaaagtgggaagggtcagggaatgtcactaaaccagagtcgagctgttagaggtgaacattttcttgcaaaaaagaacctacgagcaaatggccctttccttcccgtctattctttggggataggggatcatgggccaggtagtatttcctgtgcattttgcacacagatgtctgtatcacacacatacagatcccatccagtcctaaaccagaagccctggggtaggtatgaagctgcaaccttaggatgctaagcaagtttttggaaaaactccacaggtaattgtgatggacaagcaggacctagacttagcccagaaccactgctctagactaagtgatgctacttttgatgataagttgtttatgatttgggagtctcactccattgcccaggctggagtgcagtggtacaatctcagctcactacaacctctgcctcccaggttcaagcaattctcctgcctcagcctcccaagtagctgggattacaggtgcccaccaccacgcctggctaattttttgtatttttagtagagacagggttttgccacgttggccaggctggtgtgaaactcctgacctcaggcagtccacctgcctcggcctcccaaagtgctaggattacaggcatgagccactgtgcccagcctgtttttaaatagtaaatatgaatataaattatatgcctaaactgagatatgagtgttataattttaacattaaygtaagatcagactgaagagtcagtgctaatgaaccacattttggttctaattgagtctaaggcaaaagtaagagctgtttgctcatcataaaccatatactcaggaatcttgggacttcctttaaaagttaagacaggcggaaatggggtcggctgactgtactctacaggtttaggtcaactgtatctggctctcttcctttaaaaaaattgaaggttaatgtttttagataaagatctttgaactgacacatttttatcgttattattatcgacacatttttatcgttttatcattaacaaaaatctagggaaaaagtgttctttatttttctacagatgagtatctttattttattcttgatttatagttttagtcttctctgccagtgtatttatcttgaaagaagactttctgcacatctgcacatttgagagatgctcctttcagaagcacccttaggagtaatcactgtgttagccacttgcaggaaggccttattgctttaagatggcagagccatcacatcctggcctcccgaagttgtcatcttcacccaaaactgggcctcatgtgtttccttttctgctcttctgttttacaggtgtgactcagcacttctgtaaaatggatcaaaaatgtgttaatgcaggaagacggtagatacaggaaggaagaaccaataattaagggttcttttatttgtttggaacaaattcataggcaaagccttttattggtagcttgaggaaacttaaaagtagtaggaaagggtataaaatctctttctgggacacgctaaactcctmgttttataacacgttgtctgtgatatttctctagccctgaagcacttctgaacattacttcagaacataaaacctatgctttgtttttaaaggttttcgttgttatgtaatagcatccagctgctaatccttttgagcagcacctgtaataataatatggcaggaggagccttccgttcgctgtgtgcaggtgtctgcgggttacctcctgcggtggagctgcatgaaaacaagcacaccgtctctgtgaatagccacagaaacatctgaacgtcctttgcttagcatgcttctttgcacttgtgagggattctttggggaggagggtgatcatctctgatccatggatttagcttccctgccagcgatggtatgcgattttgacccagagacatggggagcttgtgccttcgtgaaatttgcggcagcggcagtgtgtgttttatccattaacagaggcagcatagtggatgagctcaggtttgagttcctgatccatacttaagctctgtgtgcctcaatttctccatctgtaaaatggtgcctacctcattgactgtagtgaaattaagagtgtatatgcagaccatggaagagttccttgcttgtagtaagcactatgtaagcattaacctgccattactgttaatattactgttaatgggccgggcgcagtggctcactcctgtaattccagcactttgggaggccgaggcgggcagatcacgaggtcaggagatcgagaccatcctggctaacacggtgaaaccccttctctgctaaaaatacaaaaaaattagctggatgtggcggcgtgtgcctgtagtcctagctgctggggagactgaggcaggagaatggcgtgaacccaggaggcggagcttgcagtgagtggagatcacactactgcaccccagcctggttgacagcaagactcygtctcaaaaaaaaaaaaaaaaaaaaattactgttaatgtaactattgtttaacttttccctgctatgggatcacattcaattgtaaaactactgttttttgtttttatttttgtttttttgagatagagttttgctcttgttgcacaggctgcggtgcaatggcgcagtctgggctcactgcaaactccacctcctgggttcaagcaattctcctgcctcagcctcccaagtagctgggattacaggcacctgccaccacacccagctaatttttgtatttttagtagaaacgggatttcaccgtgttggccaagctggtctcaaactcctgacctcaggtgatctgcccatctcagcctcccaaagtgttgggattacagttgtaagccactgcgtctggcctgtaaaactgaatttgcttaccttttggcattttctaccactgccttaataactcacccacccaaggataaagataagaaaataaaaacattttcagacttttcatgttttattggatatttcaaacatatgccaaaatagaaaggacatatttacaggaaaatgttatttttattttatttatttatttgagacagggttccactcacttgcccaggctggagtactgtggtgcaatcttggctcactgcaacctccacctccccaggttcaagcaattctgcctcagcctcccaagtagctgggactacaggcacgcgccatcacacccagctaattttttgtattttttagtagggacagggttttgccatgttggccaggctggtctcgaactcctggccttatgtgatccacccaccttggcctaccaaagtgctgggattacaggtgtgagccaaaaatgttgatttttaaaggcaaaagaaatgtcatttgaaatgtgaaaagtagaagttacacatctattgccttgaggtagctttttaaaatgtttgtcttatgcatacacactgtacatagttgtaattctagaaaacataccattttatggcctttctctacccagcattcaagtataagcatttttttcattgaaaacaaatagttttcaatggttttgtaccataataattgtttccctttttaaaaaaattgtagataaaacattggtgaaaatcttactgcagatagtttgggggttatataggaaggtgatttttgttttgcttttttgattaggagtgtcaggatttctttcgtggtacatgagaaccttactataaagtggctctttaggaccgttctgaagtcagccttatgaaggtgaaatagactctgatgaaatcaccccaagtctgtggcttttgttgtaaggcagagctgctctgtgtcaatacctggtgtgtgagaacaggacgtggtagctgtcatgggaccctctagcccatcattctctagacctgcactgtccaatacaggatctactagccatgtgtggttatttaaatttaattagaattaaataaactgaaaattaatttccttattcacactggccatattttgagtgctcagtagccacttatggctagtggctattggtttaggtgagcacatataaaacatttttatcactgcagaaagttcggttgagtaacacagctctagattagtctctaactgctcagcttcttaaccttacagtgataagagccacctcttataggtaagattttctagagcaaagttgggcagaccttgggtacttgtttttgtatatgtagttttataggaatacagccacatcgatttgttgacctatactttggctgcttttgtgttacagtggcagagctgagttttgagtagttatgacagagaccatatgtggcctgcaaagcctaaaagtatttgaccctttacaaaaaggtttgcctaccgcttttatctagatcagggtttcttaacctcagcactgctgacattttggtctagataatcctttgttgtggggctgtcctgtgcattgtggtgtttagcagcttccctggccttcacccaccggatgccagtagcaccgcttagatatgacaaccaaaaatgtctctagacattgccaaattccatggggagcaaaatcacccttggctgagaaccacaaatctcaagcaatgtggcttggcaaagcattcatctgtaatactgcaaaggagcgcccattgttaaaagcaaaattggttgaaagagctgactaaattaatgagtagttttttatgctacttagtatacttcagcattgtctccagaaacaggaatgttttatataaaacatgacaaagcagctggagtggggcagagacatggaagcattctcatgtccttccatttctcaggggtgctgcagttcactgaggagcagagtgtggaagttacagcatatctgagctatggggtgtgtgggttgtgttatacccaggttctcagggcctgcttttctaaaacgctgggtaactgcaggtgtttgttgtttgctaactgtgtgtagatatcatctgtgtatgcctggcaagaaaggagttaataaatgtcacgtctataatcccagcacttggggaggccaagatggaaggatctcttgagtccaggagttcaagaccagcctgggcagcataaggagaccctgtctctatttaaaaaaaaaaaaattagctgggtatggtggcacatgcctatagtccaatttacttggaagactgaggctgggaggttggcttgarcccaagagtttgaagttgcagtgaggtatgatcacacctatgcactccaacttgggcaacagagtgagatcctctctcaaaaaaaaaacttttttaaataaataaatgcagtagaytggtgcttatctgtcttatgaatatttgtagtcttatgtggtccatatagattcctatcctcattacccagaataattgaaaaattggttatatttacctccattagaagttgcaagaattgaattaaatgtcaagtcctataaaattgtgttcaaggctgagcgcagtggttcacacctgtaatcccagcactttggaaggccaaggctggcaggtcacttgaggttaggagtttgagaccatcctgaccaacatggtgaaaccccgtctctactaaaaatacaaaaattagccaggcatggtggcaggtgcctgtagtgccagctacttgggaggctgaggcaggagaatcgcttgaacatggaggcagaggtttcagtgagtcaggattgcaccactgcactccagcctgggcaatagagcaagactctgtctcaaaaaaaaaaacaaacaaaaaaaccccacaaaaactgtcttcaattcttttaagacccagcatctgaatacctttcagagtggrgggttttgtaagctgtagaaaatggctgtgtgaaatagccatataaatagagtgaaatagaattgggaaaattgtccttcaaagtgaatgtcaggtatatctttatctcgttcttcaaattaaaattaaaatgtttaaattggtattgaaatgaatgtgtaatacaagtcacatgtaatagagcacactcgtatggagaatcatccccgtgtgaatatctaagaaggtaagcagcttgactactgaatgcaagtgaattttaggtgaacttgcatttcccatgtgtgacatgtttgtttggtttttcagatcttaccaatatatttgagtccttcctgcctcagttrttggcctatcctaaccccatagatcctctcaatggtgacgctgcagccatgtacctccaccgaccagaagaatacaagcagaaaattaaaggtaagaggatgggtagtttaacctggagacaaaagaacttaaatctgttggrcttcagtcattaaaagtccttcttaaattacttagttcctaatactttttcttaggcctaaaaagagacagctgtgggctgaagtagtgctcaccaacctcgggtggcagtagcaccagtttgctcatcctttgcgatttagaatcctattttcccatccttaaaacagtttacgtgctgatgggatatgagtttcatttaaatgaagataagtttgcgactggccgtggtggctcacgcctgtaatcccagcactttggtagcccgaggcaggcggatcacaaggtcaggagatcgagaccagcctggccaacatggtgaaaccccatctctactaaaaatacaaaaattagcctggtgtggtggcacgcgcctgtagtcccagctactcgggaggctgaggcaagagaatcgcctgaaccaggaagcagaggttgcagtgagcctagactgtgccattgtactccagcctgggtgacagagcaagattctgtctttaaaaaagaaaaaaaatctaaagctccacctgggttcattggattttccattttacctctgtgtatgtttcagaactttcatagtgaaaagtctagatacatgaagctccaccaagaagcaaaggaattcaaagtttgtgaaatatacctgctgcttttaaccaatggcaggcattagtatctagccagtttttcacatgatgggcctatctgcatagcagtccagaatgtttgcttcctcaaaatgtgtggcctctctgaggtacatttgcaagaggtggcagtagaagtaatttaccagagcttgaatgtgcaggtcttcactctgaaatgtgcaggtatgaggcaaacagggactattcatgaaacaatagcttttcttctatttgttttctaattcttcttccaaggtctctatagggtattgtttggagctgttgttgagataaagcagaaataaatttactataattaattagatctcaagtgctttgcaaattaatatctaatttatgtagcaaaatatatagctaagcaaacatgtatttgaagaaaaaggcagtcagtttcagccagataaagtgctgttatgagactatattaaaattttgacataggaatcacttagcaatgtctgcaaaccacagatatcttggagcagagtatatttctctagttcacatatgcattctgtctcaacaatttagcagtagccctgtttcagtacatgtctgctatagtcccatttacaaaaagaaccgagcctacatttatcttagaatggctcactccagcgtacggacccctagccttcggaaatgttcatgttggctatcattttgtcttccttagtaatctcagaaaatcatggccatcagacctgagctcacccccacttcctactgtgccttgatatcttctcccttccctcctgcatcttttctttgttcctaactataggaaataaataagagacacccttcctcatttctcaaactcactcccaccaccaatctgtgatcttgttcccccaacccccygccccctcccaatgcagtcttcctcctccaccccatcagaggtctccctgtttcaggagcagtgatctgctcctgtgggctctcttaggagtcatgctgtttattccttttcattttcaaacttcttgcgtcctcaccttaaactcctctagtttttttcccctcctctgcttaatctgtgccctcatttcttcccaatcctttggactcttctcaagtcccattttgctggacctttctgcaagtgttacattttaccctcatctttctggaaacttctcattccatttcctaaatgtggtcattcacttaggactcggtccctgggctccctctcttcctttgtcatccctgaggagctgtttcacctctcacagcttcagtcagtcccctccagggagatgatttctgaatgtgtgtctaggcctggcctctctcccaagctgctgctggacatttccatttgtgtggcagtcaccaccaacccaacacagctaacacagtcagtgttcatatttagttggcgctgtattatagtacatgtttgaaaaagtgtttaaatattggatagcccgtagcactgggcaccattggagctgtctaaagctgtcayttccctgctcaaaaccctttgctgggtgacatctttgcctgccattcagggctctctgatactgagtggaatctacatctttgcccttactccttttttttttttttttttttttttgagacggagtcttgccctgtcgcctaggctggagtgcagtggtgcgatctcggcccactgcagcctctgcctcccgggttcaagtgattctccttcctcagcctcccgagtagctgggattacaggcatgtgccaccacatccagctagttttttgtatttttgtagagatggggtttcaccatgttggccaggctggtctcgaagtcctaacctcaggtgatatrcccgccttggcctcccaaagtgctgggtttacaggcatgagccgctgcacctggccatagttctctcttaaggttgtgtttaaacatcccagccacttactttcaacaaaacaaagcctttccctggagtggcctctcctatgccatagctggcaggacttgggggtcagtgtggctgggactgcctcggccgtttttcgtccgtaactgcttccctctggtgacactcagcagctccttttatcttcctctgtttcctcctcctcrttggtgaccttgctcttcctttctctctctcaaaggccttgtcctagtaagtacttaatatacatttgtttccttgaatacattaaagagggctgatagtatcaaattctagtgtcaaaaaaaggtcaatatttatcttctacaaaggaagacgcaaaatagtcaacccattagaggttaaaaataaaattgttaaagtttgaataaatatttctcaattaaggtaaattcctacctaatcatgggctactttaatctcatcaaaatcattagcataaaattttgttataatgaatttgaagggctctaagtctcaagtctgcaaaccttttctgtaaaggaccacattggccagatgtggcctttatcacacattctgtttattattttttaagacagtttttaaaatataaaaacattcttagctaggccctgtgctagttattcaaatctggtaggcccatttggccattcagcttatcttcctattgcagtgagtccccgcaactctataggaggaaaaacaaagccacaagggtgtgtttttgtgtggcttgcattttgaataggtttctgtcatgtcttttcctattgtgtggaggctgttcacttgaaaacagtatgcacttagagtttttaggaacaagtttgtttattcagcagttcttaaaagccgtttcagcagtcttattcagcctagggttccaccaaggctgtagcagcggaaatctaccttcaggtaaattatacatggaaaaaccactcagagccgagtggtgtctccgtatagcagcttagtcctgagcagattgagcgatggtttttgccagctgcttcaaaaacctgacaggcaggatctgtttagactaaaatcgattcctaaaataatagacctggactgacygtaattatgtaactgcagatctaaaaatgatgaaggatttccttataaattactatggaatcatgactggtcctatactatctgggagatgaaagtaaaaagaaagcgtggggctcccatttccctggtccctgaagagttcttggggtgctgcagcacacacattcccctgcaagctgagcctgctgtgttgctcttcccaatacccctttcctcagggggcaaaatgcagaaaccctgtcccaaagaagtctccctatgggattctccttagctgtagtgatcatgattactgtcatctttgtcccccctggtgttcaaggtaagtttgaacctccgcagccttgccagctttttggggtcgccaaagcacatgcctgcccactcactgcccttgttgtctttctcccaccccgtgcagagtacatccagaaatacgccacggaggaggcgctgaaagaacaggaagagggtaccggggacagctcatcggaragctctatgtctgacttttccgaagatgaggcccaggatatggagttgtagtagaaaaagcacctgcttttcagaaagactattatttcctaaccatgagaagcagactataatattcatatttaaaraaagcaattttttttattactaaacaaggtttttatgaataatagcattgatatrtatatattatatatcaccctttagatcttgatttcttggtcatttctcaacctgaggtgcatagcatattcccacattccatttggtagcaatatgcggtctgaatgcatgcattcatgagtccatgtggccaagtcagcctgtgtgctactgaactgtcgaaggaaatagccgctctgataggtagatgtgagtaaaaagaacaggaaaaaattgcttcttttattggtttccaaagaaacaaaccaaaccaaccagctcttggatgtgaagataaaatagtgcttttttgaaatggagaggaaaaasttggggaggaagaggcctgctgtgggggcatcggagccagccatgtaagaatcagagctgctccttcctgtgaatcctaggtggccctatgtcttctgtggagttacagtataaagcagggagctaattaagagtattaaaacttaaaaccattttttgactctgattttaagtacatttttatatgtcagttgctgcccttcacactaccaggccctgcagccacagtgttctgttggagaaacttggggaagtgttttctgaaccagttctttttcttggggtagagcgtgaaatccagacctgtttttgaaaggacagcacaggaggagaaaagtgactgggacgatgcttcctctcatccaaaacacatgcagagtcacatcctcatcctagtgtttggcagtttgagaccgctaccctgaacttaagagctttaaatatgagggttgtgtttctgggggggttatttttttggtgtgtgtgtgtgtgtattgtgcttagaaaggttgcagatttcatcttcacctaccaagaggcggccgcctccttggacaagccgctcatggaccattagacttgagaagacgacccacrtggtgactgcaaagccctgggtacttgccttcatgttctggtttggttttccctttttctgctgctcttggcagcagcctggtcatcatctgcttgtgggagtgggaaatgggtattttagacccaacacaggttctaaatttaaaacaaataataattggaacaaataaaggttcttgtacccagagtgattctacatgggaaaaacaaaccagcttttttcagagagtgaccgaataggaagaagggattcagaaatatgatgtagtagaacatgccctgcaggaagaaaatgttttctctcctgygtatgttaagaggaaatcagtttaaaatgcctgctaatcaaatgtcgactcagctaaccatatgtccaggttgctgcagagtttctttcaaatctgagtgttgcctgctgaactcggaggggagtttggagaaattttagacagcagctctgtgttctttttttgccgcagccaataagataatagcagaattagccaatcctaaaaccttctaaagacgatttttgagcatcccactgggattatttaatttttytttttgacgtgtgtttttagtttagaagtgctgtattccacaaggtttaagtcagtgaggttggaagataccctatcttttttattcaaaaagcacaatcaatcttttgtttgaaaatctatataaagtacaacttgcttttagcatgattattttcctaaataaaaagacaaagaatttacttactttatgttaattacgggcatgaagcaaaaggttttctttaaaaaaaaaaaaaagtgcagtgatgtagggctgtggttagttaaccgtactgagttatccatctagcatctgtggcttgctggaagggtagtattaactatttaacatgtaatggtgtacttcactcttacctagcacgctgtcttctcattgctttgggggagggagggtctctctgctggcactgtctaacttgcttacctgctgactttgcagtttgcttgtgctatgacatttattgtaggtgctatttagggtaggcttaaagtgctgggtggtgatttgagttcaaacaataaaaaattgtattttttcaatattgtawaaacaatagtgttctaattaccttaaaaaaaaataatgaccagttaagaattgcttttgatcttgtcaaaaaactgaatagaccccagtttcgggaaggtgtgtgagcagtgccatgactctgccccttacctaatcccacatctctctaatgataagacattggctcgcctctgaccagagccccagcaccagagagcggaagatgcagaattgtcaaatgacctgctgggggaggttgtaggagtttagcagatttgagtgtggctgcagagagagagagagtgtgtgtatgtgtgcacatgtgtgagagtgtgagcgagagtgtgtgtgtgtccatctaagtstgtgtgatgaaggtgggataaggctcctctgttagtgctggaagctcctgtaattgccgcatggatcccactgtgccctcttgttctgtgcaagtctgtcctgtctgggcactaaccttggtcccatgcatgtttatgttctgggtggggctttgcctctccactgggaaactgacttttgctgggttgaacagagtcccttatgctttttgtcctctccctgcrcctgggagaggtgggagtaggagcccaaacacacaggtacagaaagatctggaagaaggcctggcagtgaatccaaggactctgggcccccaacaatagatggtagcgtaagtctggagcagcggtgtttcaccacmaaatgcctttccaggctgcccttccaacactcaggagagcatccagatccctgggcagaggctctacattcttggctttagaggtggtggcagcggcagcaggtcagagccacttctggcggtttccctcccctttttagtgcccatagtttttggatcctcccttgagttttaccagcacaagccattctttgcccctgttcacataactgagctcaagctcttgccaaacaccaacaagcaagatggttgcaacctggcaacattgaatccaccacccttgggctccctctggaagccccagcaccggggggcttttgggcacagggtcagtggtagccatcttagacactgacatttggctttgtcgtcaatttcatcaccctccttgaggttactgtgcagtttcaaccagcattttatcctagtgaggtcattatcaggagttgccatatcatctctccagtacctaacatttctcatccacttcaaaagctgttctgactgccagctggctgatctaagctcctgaggaatgtctcctctcaaaggaatttttccctccaaaggccccctgaagtcctagttggcattggcctggcacatgctttatgttaggcctcccgttgggatggctgagaatcatgaaagacagatcctccgctagcctctgtgggtcaagtttctggacaccaagtctctgggaactagtgtttgattttaaatggcatgtggcccttccttgtttcagtgacttagaaaagtaaaagccatttaaaaaagttagcaagattttttatcgacttcccaactgggcttccagccttgttgaatgaaatcatctatctctgattgggcgcaacgaactgcatttctttggacttctgaatccatgtttgtgctttctctggcccgtgaacacctcggcgattctgttagggatgggatgagtgggagraagccctttgagaagggggagccggccctgtcatgcgcaggttttccactcatctgaggaagagccagggctctgaatttagcctaacactcatcttggctgtgggcttgggaagaaatggccattatttacagattgtatttggtacatattgtgtgatacttgaaaagataaaagggactgccagcccctaactgaaatctgaagctttttatcgcttatttttcctcgccctgtctcctcccttccacytttctccttgcattgtgatgatctagtaggcacgtctgtcaacaggacacatgcctcctctgactataacctcttaatagttgtgtataatgaaaactgtaaacttttttaaataaacgtgtatataccttggcaaatggctggaccttgatcaataagataatagccctcatgattactctcagctggttttctaaaataccctctctgttctggctcctttgagcagcagacgctggcttcttttggctgagcagctcttagaatgcagatgactaaattagtttgggaagggagtggcacccttaggcagtaataaccaagaggctctgcccagaggcctgtccttgaacctggaactcagatgcacaactgctggctatgaacggggctgtgaggctcctccactagagccgtggaaagcccgaaggtccctatctacccccatgcctaaaccttctaagccctgtcaactcacgctgagtgaggatactccgtggcctggagttcaaggacagtgcagcttcctgctgggactgatctgcctaaacaggtggtcctctgccaagtgctaagcctcctgggagatgaggaacggtgggttttgcatggtaaaatgctaatcgctggattagaccgtttcgattcctttctaaagcgtttgcctttagttaccaccagatggcgatgccgctcagtctaatggagacggttttgttagcaggaccttaagacaaaggaaatagtgttgctttgttcgcgtgttctcattccagctcttttccactgttttctccttattcccctaaactcctttttctccttccctacatgctgatgcattcgcgccggttgacccggcttcatacctacctgccagattgaatgaggtcgggctactgaggaatggtgtgccagtgcctgctccctcctcactggcagggaaccccccagctaccctggatgcctccagagcccagaagcaaaacattcaatacattctttgtgggtggcgttcatggaccctttagccaaaggactgaaccacagagccatgagttcgagtcccagcccttcctttagctgtgcaacttcaggctcctcactgggctttcatggaccttgggtactgagctgtaaactgacatccctagactagtaggttctgactctgccaccttgtgactcaactccacccaggctgcgaaacagtgccccgtcataggatagagtaactgagagaggatgctgtatattaaccacgaaacaccagcgtttcaacacaggtttagagtttttagactcagagcattgggggtgtagagcactttccagcctgaaggggacttaagaggtacatgggtcacgtgagcagtcattccattgatctcaataaggcagctgcttttaaacccctcccaggagaagtctcagtgcagtcgccggcacttgggtcccccgacctcccccctccaccaaccccagtaatctcacccagcaccactcaacctctcagcctcagtctagctgtttcccaagtggcaggtggcttgtcactacctgcctgagtcattgttcctttcctgggaaggggaccggggtttctgaggcacgttgtcctggaaaagaaagctagtgggctctgagccccacagctttcttgctggctctgaagactgctctgtcctcctgggaatgagtggctgtgacactggatctgggggtgtcccgcttcccacccagaaccaagacaaaggatttttctgactcccacaatccctggagctgcagaggccttgcagccccctggcaggctgagcagccctatttgtaagtagcatctcaggggctcatcccccctgagtcccggacagtgcaacttgggcccaagcctgctctctcgggcctcagggtgtactgtgtgtgcaccccccaacgtcttgggactgaatagttatcctgaccagggatttaatgttagaagataaaagataggagcatttccctctggctgtgtgtatgtgtgtgtgtgcatgtgtgtctgcacgcgcgcgtgtgtgtacctatgtagtgaagggtgtttattttcaaaaaaagggcacttctgtggacctgggctcctcagagctctttggggctcaagacttggctcccaggacctggtgtcgaggggtcagaggtggcaacaacggacttggactccctaagagaaaactacacccttctggctgccggtacttggcaatgaacctagaagggggtgccggatgccaggtgcggctggcattcaggcctccctcagcttcctctcctggggtcctggccaccaaggccagccagcacgcggcaagaggctccttgaagaagctgcggcctccttgtgggcagccttgcctccgctttcctcaattctgtaagcagcgcatcagggcctgctacgcaccactcatgtgttcacgcgcataggacaaggcttttaaagatgcacttctttttttctttttctttttcttttttgaaacgggatcccactctgttgcccaggctgcagtgcagtggcataatcatggctcactgcggtctcaactgatcctcccacctcagcctcttgagtagctgggactacagtcacaagccaccacgtccggctaatgtttgtattttttatacagatgggttttgccatgttgcccatggctggtcttgaacttctaggctcaagcgatctgcccaccttggcctcccaaagtactgggattaaattttaaaacgagtgtaaattgttctgcaaaacaactttgttttgtaggactacgtgtcactttaaatgttgaaaatgtagcgtccaaattgagatgtgctttgtgaaatgccccctggatttcagagttagcacaaaaataagaatgctctcatgagccaccgcacccagctaaacgatgcatttctgccaacttgaaaattatgtgctggtaacaaatcaggattccagaaacatgccctcctccagagaggaccaccatgggcagggctgaagagggcttcccctcgcgagtctcgctcactgcagtgagcccttcggtgagtagaacaggacattaactgcttgtgctgtgccaagtggcttagtcacacagtggcataaccatgctagaacctgggtcttcaggccatccatacgtgttctttccaagaatcatgctgtgccaagctcagtgcctgcccccaatgcccgctggggctgtgggtacctatgtctgtgtgaacctcatgctgcctgggccctatgagatgctccctggctgacctcctgcccagggctcactctatgggcgtggtctctgaggatcaggacctttccccatacacatccccatttccactgacaatggtttccccaacctccggtacctgcagtacggtcagaaaataaaactagatttaactcaaacccacttcctagtgcagaaatatagaaatagaatgtgatctacatttatcattaaaaacattctagtagccacgttttttaaaaaaggttaaatgtttcatttaactcaatatatcaaaaatacttcagtgtgaggccgggcgccgtggctcactcctgaatcccagcactttgggaggctgaggcgggtggatcacctgaggtcaggagatagagatcatcctggccaacatggtgaaaccccgactctactaaaaatacaaaaattagccgggcatggtggcaggcacctgtaatttcagctacttagggggctgaggcaggagaaccagttgaacctgggaggcagaaattgcagtgagccgagatgatgccactgcactccagcctgggcaatagagtgagactctgtttcaaaaaacaaacaaaaatttcagcatgtaattcacagtaaaggaatgagatagtttcgattcgttatttttgtgctaactctgaaatccagggggtatttcacaaagcacatctcaatttggacgctacactttcaatatttaaagtgccgcatagtcctacaaaacaaagttgttttgcagaacaatttacacttgttttaaaattaaaaattaattaaaattatataccacgaaaaatgtgataatcaatagccacagctggctacctattcagaagcacgggccctagcagcctctccgtgctgcagggatctttagagaagcaggcctggcgcggtggctcacgcctataatcccagcacttcgggaggccgagacaggtggatcacttgaggtcaggagttcgagaccagcctggccaacatggtgaaacctcgtctctactaaaaatacaaaaattatgcgggcatggttgcacacatctgtaatcccagctaggctgagtcaggagaatcgcctgaacctggggaggtagaggttgcagtgagccgagattgcgccacagcactccaggctgggcgacaaagcgagactccgtctcaaaaacaaaaaacaaaaaccacgaagctggcaagtgacaagagcaaaggagcaactttgcttgggaatctagggcagaacccagaacctcccaatccgcggagaatgttccaggtactggaagggtggacggcgcacccagtccggtccctgggggcggactgggtggccaggccggagctggcagtcaggggagcctgggcagcgcctcggtccccttggggccttgacttccaggacgtgagaacgccgccagtcctgcctcgtgggccggagcctagcaggccccggtaaaggaatcactctgtgggttacacctgtcctccgcggaactgaagctgcccgggctccaggcgtggacagcgcagcccagtaggtgagcaggcaggggcgagcagggcggagcgggtgggattgggctgggcgggcggggtggggcggggctgcggagtccgcgcggcagtccccgccacggccaccagggggcgtacgtgcttcgtgcttcggcacccgctcgcgggcgggagtctgggtggggcggggttggccggggcagggcggtccaagtggcccgcgggcgtggacccgggaggcctctggcatctgccccacctgagaggtgggaaccgggctgggagggacgtagattcctcatcgacgtgacccttgtagggaaagagcccccaaaacagggagttcggtagaggcgccagagctgacatgggcactgccgcagtgccagccacggccaccaaactctcccagcacggctgggcggccaaggcaggggtgacgacgagaggggcggctcagcccacctcccccgctgatctgtcgggaaaggaggaagaagggtcatgaaagcctcacacaccgctaggagggggcatcctggagcagggggctggatcaggacccggctggatgggaaggagctgggtaaagggagggcacccgggtagggcgtggcccgggctgtgcggggagcggggagcggggagtggactcagggggaggggtcagcgttctggctggcccgggggcacgtggccggggggcagggtgggaagagggtgggatggtggggtgctggcttggggccaggtcaggcatcagaggcacaaagtaaaggatacagagagaggggaagggagaaagggagagacagagacctgaagcgggagggccragcggcagggcgggaggcgaggatagtgggtggggctcgggctgcagggctggagcctgggggatctggagcacaggggcaggaggaagggaccggaaggatacctgggcctgcagggcgttccctgcggagattgattgagtgaagactgcgacgtccaccttcagggctctctctagctccctcttcctgtctcctatcacttgctctgggggaagccagcgggttgttttgagctgccctctcctttggagagccccacctggctgggaaccgaagccctgaaccaacagccagcaagagctgaggcttggcgaccaccagcgcgtgagccggctgtggatgcccggacccggtgcagctgagaatggctgcggcaggcctcatcagcgatcctgagccgcagcagcctgagagcagcttcccgggctcctgacccttggaaactgggaaatagatgggaatgcgggtttgctgctttaaggttctaagttttgggtgtaatccattatgcagcaatagatacctaatagtctgtggttttttggaaccactgtattttccccatactgcttatctcttaactagttttatgtgagatagaaaaataggccgg

SEQ ID NO: 94028 - DNA, 111850 bp, Homo sapiens
agatttcttgaggtcttagatgcattctgaaagtgctatccactatttttgtacttcaaaatgacacgattgtgacccttgaaatactcagagaatattttacttgtagatctcaaaactgcataataaatattactcagagtcataagtatcgacagagtcgtcgacaatattcctattctttaatgcctaacaccatactgacaagattaattgaaaaaatatgccttaggggaaaatgtaacagttgggtatggagggtggggaggctctgggatggtgggaaggagagcctatgatacagattatactatcttcattgttaaacactgaatataatctcctatctttccttaccagcagattcaccttcaaccttcttgcttttacctaatttaaatcgttgctttattcacacctaaaacaaacactgtcataggttcatgtccattgcagcattttgtgtacagactacaagttttgctttagaagttatgagaggcagaaggaacacagcttgaggttttagttttcaggctgagcttgcagcaggggagaccgaacaaactttgggcttgaaaccaatccaacttgtaaatcatcaaggaaaaatgaaacaaaattaacaattaaatctacccaggtctagtctagggaaaagctgtaaagttctaaatatgaggatttgggttcaattcgcacacctcctgtccctgatatatcctgctcatgctcctgcaaagcatgtccgacccttggtaccattttatgtttggttgatctgataccactcctttcagcatagctgatgacccctgctagcaccaattttccaagaccatgtttcttcttcccactctttttttggtactacatgcattctaccagtggttttggacgttgtaattcattccagaatagcggagactttgatcctaatattttcaatttgtcagaagggaaagcagtcccaagacaggttggtagtaggaattggcaacaaggagtcatctttgggaatccccaatcatactgggtgggccacctactttgtttccagagagctggcaaaggtaggtagaatacagaataaatttctctagtcattttgttaatgatctattcaggagaacacagtgtttgtactgaatgatccttattgttgatatacaagccctatgtcattaagtaatgacacacctcttgccttcagtttgcccatgattacttagtaagtttgaggactaagttgtatatttttatttgatagacaacatgatttagtaataagagacaatagcctagacagaggaataaagagttttaggtcctcttgttctcttacagctaaattgtggcaaattaccaaatttctgagtctcagattgctctcctgtaaaatggaaattttaaaagcctattactagtctagggatcaaataaaaaaataaacataaaagggctttgcaaaatataaagttcttcactgataaatcatcatttatcttgtttctgtccctaaagggagttaaatttgtcttaactcctctactccctctcaactagtcctcctccttgagaacaacttagaatattcatttgtaaaatagatgccccagttaggggtatggctagaataaagccactgtccctaaaagaaaatgaacctacagctaaagctagtgagaccatacaaggaagaaagtggtctgactgatctcatgttatagtttcaagaaggagcagatgaactccgtgaacactgagttattcactgtcaagatgcacgatgtccaatcagttcattctgatttgcggaatgtcattagatcactagcatctaataggtggatgaactcagtgtactcaggggtgaacaggtgtctcacagctgggagctgccagagagccaaggtgcaatcatgaaccatgttttctgaaattagctctgatgaaaaatattattccagagagaaatttttcaaagaataggcagagcatttggtaaatataggattgaacactggaaaatttaaaagaattttgtttcattctaatcactgaatggtagtatacagaattccatctctacagttgaaattgcatctccatacgacagacaactggatctgaagtttaatatcttgcatggacattaccatgattacatatataaattaccccaatcaaggtgaacaaaggtgaaatgatgctgtgcttatttttaaatatttctgcctagcactagttggatagactcagccaaactttgggcctaattatctgctccaatgatgagaagtgacataaaactatcaaagataaccttactcagcacatcatatgtttaaatagcaagttgcaaattacactttcagaagcaaggttacatcaccttgtatttgataaaatgattggtttgccaaggaaggaggatcctacttgcccactgttccagcattagcactactttttccagcttgcctcataaatcctggaataaggtaactgatttccatctataggcataccttggagatatcacaagttttgttccaggctaccacaataaggcaaatattgcaataaagtaagtcacaggatattttttttgtttcccagtgcatataaaagtgacactgacactacaatgtagtgtgttaagtgtgcaatagcattatgtctaaaaaaagtatctaccttaacttaaaaaatattgtattgctaaaaaaaatcttgcttaaaaaatattgcttaaaaaagttggctgcagcaattgactctttatttcacaaaatattcctccatgatatgaactgctctttgatagcattttaccaacagtagaacttctttcaaaactcaagtcaatccccttaaactctggactgctttgtccactaaatttatgaaatattttaaaatctttgctgtcatttcaacaacgttcacagtatcttcccaggagtatattccatctcaggaaaccagtttcttggcttatctataagaagtaactcttcatccattaaagttttactatgagattgcagcagttctgtcatatcttcagaccccacttctaattctagctctcttgctgtttccaccacatctgcagttacttcctccattgaagtctcaatcccttcaaagctgagactttgagttcctgagagatggaatcaacttcttctaaactactattaatgatattttgacctctcccaccaatctcaaatgttgttaatgacatacagaatggtggatgttttccagaagtttttaatttactttgtctagatctatcagaagaattcctatctatgtcatccatagccttattacttcttaaataataagatgtcaaagttaaaattactcttgatccatgggctgcagaatgggttttgtgttaacaggcatgaaaacaacattaatctccttgtacatctccatcagagctcttgggtgaccaggtgcattataaatgagcagtaatattttgaaaggaatcttttttttttctgagcagtaggtctgaacagtgggcttaaaatatcctgtacatctatgctgttaagtagatgtgctgtcatccacacttcattgttccatttatagagtacagacagaatagatttagcataactctttagggccctaggagtttcagaatgataaatgagtattggcctcaaattcaagtcattagctgcattagcccctaacaagagagtcaacctgtcctgtgaagcttagaagctatgaaagtcctagatggccttttctttctatagaaagctgtcttatctacatggaaaatctgttgttttgtgtggccacctgcttcaattattttagctagatcttctgaaaaacttgccacagcttctacatcagcacttgctccttcaccttgtactttgatgttatggagatggcttcttttcttaaatctcatgaaccaacctctgcttgcttcacatttttctgctacagcttcatcacctctctcagccttcacagaactgaaaaaagttagggccttgctctggattaggctttggcttaagggaatgctgaggctggttttatcttttattcaggccactaaaactttttccatatcagcatgaggctgtttcgttttcttatcatttgtgttttcattggagtagcacttttaattcccttctagaacttttcctttgcattcacaacttagctaactttggtacaagaggcctagcttttggcttatctcagcttttgacatggcttcctcactaaattccttcggttttcgatttaaagtgagagatgtgccacccttccttttacttgaacacttaatagtccattgtagggttattaattggcctaatttcaatattgttgtgtctcaaagaatagggaggcctgaagagaggaagagagacaggcgccaatagtgaagctttcagaacacacacaacatttattaagtttagcatcttctatgagcagagtttgtaatgctcccaaaaaactacaatagtaacatcaaagataactaatcatagatcaccataacagatgaacagcaagtgaacacatgctgcttgaaaaatgatgctgacagacttgcttgagtaaggttgccaaaaaacttcaatttataggaaaacatattatctgcaaagtacaataaagggaagcaaaataaaaggaggcggggatttgcttatggaaacagcttcgtatctgtgataaaggaatatactaagtaaaatatggactaccctggactgtctaacacaactacaaccgatattcacttggacaagaacttagttcaagtgcttctgtggtcacacaacccaaaaggcctccacagcagaaaagctgctattaggtactcactaactaagtactgagtccccagtgtttcctgagggttatttcacaggctcctgaccctgaagcctctcagagttattccaacattaaggtcacttctatgaggaagaggtgagaggaaaaaagaccaatagtggaaggccagcttcagcgcaacacatgtatttaatagtttctctcatctttgaatatttattcacatttccctttaaagtctgtttttgagggggagaagctttattcgtacctacttagtggctgctttatagcagtaaaatagatgcttttgcagaattcttttctgcttttcttttgtgagacggagtctcattctatcacccagtggggagatgtcggcttactcaatctctgcctcgcaggttcaagcattctcctgcttcagcctcccgagcagctgggactacaggcgggtactacaggcgcgcaccacaacgcccggctaatttttgtatttttagtagagacggggtttcgctatcttggccaggctgttctccaactcctgacctcaggaaatccgcccgcctcggcctcccaaagtggtgggattacaggcgtgagccaccgctcctggcccctgcctttttattagagatacaaatcacacacgcccttcgcttcaaggggagccccgccccctacttcgggcattcggccatcctgtgttctctaatggcgtggggcagagctatcgcgagactccactgtatcctcagcaagtttttaacagtgtgaacttgcgcagaagagactcatgaagccagcgcaggagaaagggggcggggtgctctgacgagcgcgttcgccttgaccccacgctacagcgcgcgcccggcagctaggcgctgtggtttctgggtctcccgggggacccctacacgttccggcaaaaagcgctcgtgcccacctcaagcccatgttcggtgggtggcgaatgcgtgcccgtgatctgctgggtctgtagaggagcgcaggcctggtgcaaacagactcaagaggctcggagaaccagcttgggtaggcgcttgggtgatggaaggtcaggggtcagaggtcgggagggagggagggaggtggtctttggcctccgggaccagggagggaggacgctggttgtcctggagcccgggaagctcaagggctgagagggagccgctgcgcgagtcttccccacctcttcccgatcccggactagcgaacttcggaccaccacgtccctccggggataaagtggggtcgtgggaaaggaggctgtgcttctcctcatgcactggggcctgcggtgtttgtctcgagcgtccaacacactaggatccgggagtccgtcgtcacgctccttggcctcgcggtcgcttgtttgctcggcctgctgggagcgatccggcgctgacagccccgctcagactccgggagccgcttgtgggtctttcggaagataactgagtgggtaccgtgcgccgcagatctacccccggaggctggaactgggtcgccgcctcccttctttgtgcgcggcattgtattagtaaaaggggaggcagaggtttctcagtcccactcaaagttctccgttacctttggagccagattaattacattcgaattcagaaccactctttgacattgtacagtttgactggtagttgctatgtttatgaacgaagatagggtgttatttgatgattaatrgtcactgtataatgatcagttaaataatgaccaggaagcttgtgccctttttccaagtagyttgacattagcacgaggtagaaatccgagatgtttgatgccttccaacttgtacttaaggaacttaaggaacttggggctttttctgaacaaaataagataaagttattactgttactttaaattattccagtgggcattagtaggaatgatgaaactcttgaatagaaacgatccatgatatctctactgtcacaaaaaagactatttagtttatgattagtaaacatgctggagacagagcagtcctgagcagtattgtaatgattatgtctgtgctcgataacctgcactttctagagctttaaaggaccagttaaccagtaagctggcaattgagaataaaatagtttacttttgagagatgctcttgtatatcctctttgtccacccgaaaggagctggacttacagaattattaaaacaaaacttttattattaagagtttaggccagtaagatttaggggaaacaatttgctggtgaaaaagcttcttatgagggcatttttaaagtttatgtaactagcatattttagcattcagtagaagaaaatactctcaccttgctggaattatttctacagaaaaggaaaagattatgttaaccctgggtcattaagagcttcctagtacttagtaatgagtgggcttcatttccataacacaacattttggacaggaatatggcaagtatgtaatcctttttgcccttaatagcctaaacccagatctaccatggatttgttgtaattcaagatttgtgtgtatcttttaaagaggaaataatattttggagggaaaaaatgtgaatttaagttgtgttattcatttgttggattgtcttagtaatgtaacattttatgtttatttttctagcattccatccttgttttctgttaaagatacagttcaggcagttttccctgcctcgttctagtatttcatttttctcagaaatactagtttcatattacctatagtcttctagaatgtggataagagagacttctccaaaaagaaataagagtaaagtatcgttaggtcctcaaaaggagggaatacatccacggaattagagatctttgtttcaccctttttgtatgtctttacttcctagcactgacctggcattgggagtacaacactgaataggatactactcctgcccatctttcaaagtgaacactctagcagttgggatcgaggagagagaggcccttaactcagcttctctagtcatggaagcctttccagggaagattgggatggagacaggcataaaagcaattcaagcaaaaggcttttatatttaaatacaagacagtaaaagtgcggtccatatagaaaacttcacataattacgttttacccaaacactgctaattaaggaggaggaagaagtagttgtgactgataaggtatgaataaaaccagaagaatatgggatgtggttagatacagaatttcaccagtacttgacttactagttgccaaattgcattttagtcataagtatatttgaccaaatactattttctttggttcaagaagttaaccctgaatagagatttccttaagtaaagactcagtcaaaaccaggagctttttgtttggttggttgatttttgatcatgaatgtttactcagttaagaactggacaaagggagagcattgctagaaattctggtgttgacttttctgcagtttatcattatcactgataagtaccttgaggcactaatattggaagaatcaggctgaaagaatacatctgaaggaatgtgcaaattataatggtgtacataatttaaaagatactggataggttttaccagagaacagaataaatagttgaagtaatgttttctggtttggtaatatgtctgttacaaaattattgtgggaaacatggcacatattacttctcacattccattggctaggactggtcacaggaccaaaccaagctgggcagtcatttctcaactactctatactttgagtggaaataagtggattttagttggcagctggttatccataacaaggttttttgaacttggctgcaccctggaattttttagggattctaaaaaataaagggagtagtgcctgggcccttctccaagacattctgacttagttggctcgacatcaggatttttttaagttcccctggtgattctaatgtgcagtcaagtttgagaagcactaatctgtggtcccccatcctgcgacattacagtttggttattgtgaaatgtggtttagagcaggggtccccacccctcaggccatggaccggtgccagtccgtggcctgttagaaccgggctgcattgcaggaggtgagttgcgggcaagcgagcattaccacctgagctgtgcctcctgtcagatcaacagtcagtagattaccataagagcatgaatgctatcgtgaactgcatatgcgcaggatctaggttgtgcacttcttattaaaacctaatgcctgatgatctaaggtggaatagtttcatccctaaacaaccccctctccactccacccctctcctccggtccatggaaaacttgtcttccatgaaacccatttatggtaccaaaaaggttgggaactgctggtttagagtgttctcaggatgatgataagtagcaactaccatttatggaatacaggccaaatttctagtactgctgttgtacttaaattatttctaaccacaatcctgctatcatccccattttagagatgagaaaattggcacagaagactggataactattccaatgccacacagtcagtaaatgccaaagctggaattagaatgaatataagacttcaaagcattgcattctcacctttaagccacatcgctttgctaatgtgagactctgctagacagttgctttttgggttttcagagttaatgattccacaataaccatgttattaatattattatggttagtgtgatacattgtgtaactggcccaattcccttccaacactccctctacccttccaccccccatatccatgctctttgccatgtgcagtttcacctagtaaagaggtgtagtatatttcttcaccacttgacattgggtccatggatatgtcttgctttggtctgtggcaccttagtggtttttaagcactttgaaaactacttgtgtgattggatttgcrgtaatacacctcaaccattgccataaagaacattcctgagttactttgctgatccaaggagaggggataggaactacattaagcagagccaaactgcttttccagaaacctagcctagattagcctccttcagctaatgtgcagatctatgagaataaatgattgctatatcaaggtattgagctttgaggtagtgtgttacacagcatgtttgtggcagtagttaactgataagctactatagcataactttttaaagttcctgcagagtgacccactttcagtattccagcttatgctttgaggaaaactggacaaacataaacacttaggaaattaagagctttctatattattccactaagataagagaggataagatgctttaaaagtagttgaccatagccaaggattgattttaatccatcacctgcacattcataagtgaagcacgggctaagggaatagaattctcatgattgacttaaacaagcactgtctgatacatagactttttgcaattatgtgaatgctctatatttgtgctgtccagtacagtagccactagtcacatagsgctactgagcacatggggctagtgagactgaagagctgagtttataacatttaattttatttatagtcatgcatcacttaatgatggggctgtgttttgaggaatgcatcataggcaagtttgttgtgtgaacatcttaagagtatacttacacaaacctaggtggtaccgccagcctactacacacctaggctctatggtacagcctgctgctcctaggctacaaacctgtacagtatattcggtactggatactgtaggcagttgtcacaccgtagtatttgtatatttaaacatatttaaatatagaaaatgtacaataaagatatggtataaaagataaaaaatagtacacctttgtggggtacttagcatgaatgcagcttataacactgaaggttgctctgggttagtcagggagtgaatgtgaaggcctgggacattactgtacacttctgtagactttgtaaacactgtacacttatgctacacaaagtttattaaaaaataaagtaatgcggctaggcgcggtggctcacgcctgtagtcccagcactttgggaggctgaggcatgcagatcttgagttcaggagttcaaaaccatcctggctaacacatgaaaccccgtctctactaaaaatacaaaaaaaaagttagctgggcatagtggcaggcgcctgtagtcccagctactcaggaggctgaggcaggagaatggcatgaacccaggaggtggagcttgcagtgagcagagatcacgccactgcactccagctgggcaacagagtgagtctctatctcaataaataaataaataaataaatgcattatgatgttacaatggctatgatgtcactagtccataggaatttttcagctcccttatggaaccactgtaatatttggtccctcattgaccaaaatgtcattatacaatgcataactgtattgaaagttaagtagtcacatgcagccaataactaccttattggatttgctttggccaatagtagctagaaactacttccttggaggtgccaaggaaatcacttcctttgaatcatagggccaccttgttcctaaataaaggttcagtcatcagggaaggaggatagaccttaggcaggtaaataatgtcactttagtttcttttatggttattggtctattcatattttccttcttgggccagttttgttcatttgtattttgttagcaaaattttatcactttataatttatcattttatctagatttttcagatttattgaataaagttatacttaatattaaaatttctaaatctcgtgcatctttttgtttttgctctttaaatcaactttatgatataatttatgtataagaaaattcaatttaaagtatataatttgatgagttttgacagatgtatactctgcaatcatrtgttgaacatttatgtcaccccaaagcctgccttcctgctcctttactgtcagtcacctctttatacttccttgcccctggtaaccactcatctactttctgcaatcaggtttttgccatttctagaatttcatgtaaatggaatcatatagtatatagtctttcacatctagctttcttcagtttagcataatgctttaacagttcattcaggttattttacagaagtctctttttatcacagaatagtattccattgtgtgactatgccacaatttgtccattcaccagttgatggacatttgggttttcttccagtttggggcttttaatagtaaagctgttaacattcaagtttaaatttttgtggatttatgttttgatttctcttggataaatacctragagagggattactaggctgcatagtaagttatattcaattttattagaaactgatacttttccaaagtgactgtgctgtgttcaaatgttggagagttcagttctgtttgagccatactctcagtgttttaaatttttgactattttagtatatgaatagtggcatctcattgtgatttgtgggttgaatttgtattgctttaatgactgatgctggtgaaaatattttcatatgcttattttacacttataggtcatctttggtgaaatgtctattcaaaatttttgacttttttaaatgtttgtcttactattaatttgtgagagttctttatatattctgcaaacatatccttcatcagatacttgatttgctaatattttctcccatctgtgacttgctgtcatattttgatgacagtatcttttgaagaaccaaaatatttaattttgatgaaacttagtttatcatattcttacatagtctatggtttttgtttcctgcttaaaaatttttgtgccttttttttgggctaatccaatgtcatttaggttttctcctctgttttctttgagaagttttagttttagcttttatagtttattatctatttttagttaattcttacattttaggaggtaaagcttcatttcattgcatattggtatccatttactaaaaggatacctttcccattgactgcctctgaacttctttcaaaaatcaattgaccatccatgtgtgggtccactacaggacatttcccttgatctatatgttggtctttacaccactactgcaccatttttatttcttttgacatatgtcttggaatcagtgtaagtcattcaactttatttttcttttctaaaattatattgactttcctgtattgtaggcattttagtataaattttaacatcaggttgtcagtttctacagaacaaacctgttggaattttgaatgggattgcttttctataggtcagtactaagaaattgacatctgaacattttgagtcttctagtccatgaacatagtacactgtatagatctctgattatactgttatactattttctaaatttttatgtatgcttgaaaattttcagaatgaaagtatagtaagttatcttttacagaaatttaaaaatcaagaaaaaagtttactatatttatacacatattttttgtttttgctttttatttccttgtgtgtggatccagatttccatctgatgtcatatttcttctacccaagcgcttcttacattacttagattgtaggtatacaggtgataagtccttttggcttttgttgatctttttttcaccttcatttttgaaagatattttgctgggtttagagctgtggggtgggagcagtgtctaaaccagagaaatagggccaatctggagagaagtcctcacttttcagtaatttaattatggcataccttattgtgattgttctttatgtttgccctgattgggtttcattgagcttcttggttttctgagttgatggtttttatagaagttggaaaattttcatgcatgattttttcaaaaagttttttgtatcctttccattctttgctgctgagattccagttttatgcatgtttgactccttaacattgtctagtaggtttctgatgttctatttattgttttttcagtctttgtttatctctacttcatttttgacagtttctgttgttactgttgtttccattgtttaagcttattctgcttctttttttctttgccatttctaatctgctggtaatctcatacaatgtgtttttcgttttagatgttgcatttccatctgcataaattctataggagtcacttgtatatctatcatttttctttgtcatattcatgttttcctctacctttaacatattgagaatatttacagtagctgtttgaatgtttgtttctgctaattatatcatctgtgtcttttctggggctttttgatttttttcttgtaatgggtcttatttttctgttttattttcattttttttgcgtgcctgataattttagatttgmtgccagacatttgtgttggattttgtttcgctcttttaagtattgttgggctttgttctgaggggcagttaaattacttgggattgagagatttaccttcctattatawtgcttattaaatgtatttctacaatttattttattttatacaacaaattgcctttactattaaagactagcaaaaccattagaatttatttgataaatgagattatggttaatatgttcattccttagtcataatgacctggtaaaaaaattactcattgccttatatctcacagaagatttcatattatgtttatgggctatgaatttatgctgaatttctcatctggtaacccttaaatactaaatcatctcttgttatacctcctgttgtttcatttgtcctctagagttcacagttaccagccaagaaaacttgaaaatgagcagccgacggaaacgtgctcctccagtgagggtagatgaggaaaagaggcagcagcttcattggaatatgcatgaggacagaaggaatgaacctatcatcataagtgatgatgacgagcagccctgcccaggttcagatacctcttctgctcattatatcattctaagtgatagtctaaaggaagaagtggctcacagagataagaagaggtgttcaaaagtggtgagcttctcaaaaccaattgaaaaagaagagactgttggtattttttcccctttgtctgtaaagttaaatattgtgatttctccctatcattttgataattcctggaaagcatttctaggagaattaactcttcagcttcttcctgcacagagtttaattgaaaatttttccgaaaggagtattacattgatgagttcagagtcaagcaatcagttcctgatttatgttcattcaaaaggtgaagatgtagagaaacaaaaaaaagaaccgatgagtatttgtgacaagggtattctggtggagtcatccttcagtggtgaaatgttagaagatttggggtggctacaaaagaagagaagaataaaactctatcagaaaccagaaggaaatcacattatcaaggtactcagttttttgtggtgtcttttttgaggctcttctacattggcagtccaattttaaattaacttgtgagagaagtctgaaaagccagcaataagcctttcattgttaagtttcaaagtacactttaagcttttaataactattcaaagtatgttacaactaatcattttcaggctacactttttcaagatcttccatctctactttcagtgacttgttttggtcctcatcatcagttcctcttactgcagcagtcatttaaccatttatctgtttgctattttgccttttcaaatgcttcgattttgtctctggaattgtatgattgaatgcaaatgaaattctacccattactgcctacagaattaagtataatctttctaatctggcacacaagttcctcccttgacaagcccttgagccttaccctttattactctgctttttattttgtcccagaaactccaaattgatttattttctccatataccacactgactttctgcgtctttgcttttgctcttatagttccttctgcttgagttgttcccttccccttccctggtaattcctggttattctttaatatttagtatagcatttaattcacccagggagatcgtttcttaaatctattggtagtattatgtgccctctcctcagaatctctggtagatttttttttttggccttggcggcttgtcacatacttaacattttagatcattcccctctgctaaactatgaagcctttcatctttacagcctagtaaagtacctggtacctaaattttcagtagatgaatgaataaatttgtaatttatttcagtctctgtcattcactggccaaataactttatgtgaatcatttaaatgctctaatttcagtttctttatgaaatgtaaataatacccattcttcttacagcatagaattgtgttgaaaatcaggccagataatgtaagaaagtatactttgtaaactgtgaagcaagttaatatgcttttatgctaaacctgaaaatttaaaatgttaatttcatgttgtttaactgaaaactgtctcatatatttcttgcatcgataaccttagttatagttttagaattgtcagaaggaaaggagaacatttagaattattagactccaattaatttttccctgtacagtgaaactatgtaatcaaacattccctctctttactgattttgccaaaattgtggctcagtgataacaagtatgtaacaatttatgactcacatatctgtgttctatctacgttccctacagaccaagtgttaatctattctgtttttcctgatcctgaattttacaaatatttaaacatttattgctgctgtagtaagacatcaccaagcgagccaagacagaatactagcagtaatgaaatacactctttgtcattcatttctgtgtaaggctggtggattcctgttctgtagtgaaagaatatgagattctcagtgattagggagtcaggtacaacatagtcaacatgaagtaaagggaattaacatttattgagtgtctaccattagaaacttttatagttatattatttaagatggacttctctccattttgtaaatgagaacacttaggtcaaaatcaataggttatttttctcaaattcatttagcttccaaatatcaatgccagtattcaaaatcaagtctttcaactgtaaaacttcataccacattgcttcactagggtcaaaatattaacattaatcaaggtctgtttttttacacgttttagtgtttgattcagtaatgaggatgcccaaacctaactgtgcagaagattcctagcatgtatgtcataatcttctggggaaatcggcatttttaacaaacttgactgattaattcatcagttttgggaatcattgcattggtagatagaactaggtgttcttatcacattctcccaggttcgatttcagttaggggaatatttttttccagcaactcgaattgtacattgtaggcacttacatttataatttgttagtgaaaatgaaacacgtgggggaaatttggtaggcatgtatttattgtttgtgtcacacatgctatgaatacctttaaaagtagtgatgctaattttttcttgcttatgtcctcataaagaatggtatatttcaaatgaaactacttttattttgattaattgtttttaggttggaatttatcttttggaagctggcctagcaaaactagacttcttgagtgatgcaaattcaagaatgaaaaagttcaatcagctcatgaagaaagtaatggaaaagttacacaattctattattccaggtaatatttacagtaaacttaaaaattgctattacttaggagttgtgagttttttcctctaacccctggacataacaatcagaaaaacagctaataaagccataataaaaattaaatgattatatggcaaattatacttatttgaaatgcacccactaatataatytgtttctttggttaactctgtgcttaccttatattaaatattaaagaaatatttgcggagycaatatgcaagtcaaaaggcagagtctaaagggatctgagctggttgggatttttgcattattcctgtgcttttattttgtcatgggccagaaattcttggctggcgtttattccacctctcctttgcagtctgacaaataatttcaaaagcctggttcccataaagaccagataactttgctctgtttcttggcaagacgttgcatctttggtcaggactgcagattcagagttgtctgccattggtcaccttgggagagtgtggatggcttggtgcagctcatcaacactactggaaaaacagcccaaattctccaagttctgctcatggtgggtcagcattatttcaggtgcaaattatagaacattgtcatactggagtatttgaaaatcagtttctaacttcgattgttatttctctagtacattctttgcaatgctttataatatcagtaatagtaaatcgttttgcaagttagatactttaaattaggaaatctctggtttcgggattagaaggaatgaatttaagtacatctagagtttttaaacttatggccttttaaaaatattacaatttgttcattttaaagcctggtatctaaggaaaacttcaaatttagctattaatcttagattatataattatagtaaaagtctaaaacaactgagcataaagctgtacattaattgtgaagttttggaaattttacatggcatatttattggaaaaaaataagttgtgaattttttggtgtcatcttttagttttagaagttatgaggtatgtcctataaaagtatataggcctctttcaaagcaattcagaaataaatgatatactttttcaccttgaaagaattatgtttttaataaagaaccattagctgaaaggagtttgtaaatatgttcaaggtttttattacttttttcatgttatagtaagtataaatcttcttccacagaacaattgtgcccaccaagtgaacttagtgtttttacaaatttgcattaataacataatcacttgtcttccagttggctgctactgctaccaaatgcctatccttttctagcataagaaataaaatgagaacccatttcttattgggcatagaacagttatgtctccatatggattttgtatgttaaaattacaaaagtaaagtaagttgttcctatataaacttcaaacagtattcacattgagttcctcaaatgtttataaaacatccacaatagacaatacacgtgtcagctacgtgtcagcttctctgaggggctacaaaaatgaaaaactttgcctttgttaccctggggaaaggaccagtggacataaatgtttgcagtaccagatagattacaatgtaataatactgtatccacagaggagaacataattccagccagggaaaacaaaagaaaatgccatggaaaaagtatcagttaaactttcttgaagaatggatgagtagatttttgattaatgaagaattaaagatagggcctttcagtgacaaaacacactgagcaaggccccagagttgggcaagttcattgtatgctcttagaataagaattgcttatagttagaaaaaacctatcagtttttgagtacatttgctgtgtgatgtacagatgtgttggaagaggatgaagatgatccggagagtgagccagagggacaagacattgacgagctgtatcactttgtgaaacaaacacatcagcaagaaacgcagtccatccaagtggatgtccagcatcctgcattgatcccygtgttgagaccctaccaaagagaggctgtcaattggatgctacaacaagagtgtttcagaagcagtcctgctactggtaagaataagatgtttaaagaaagtccaattgattagagagattacatcagagacaattagggcagggtgaaattgatcattaaaataaacatcctgaaaatataagatagaatgggtgccataaaattattttctaagaaattctttaaaattgaaatctagaaaaatgaatttgtgagtttcttcattcataaaagtttgtactggtttttcttgccaaaaggaaatcaatcctgcctcaattggaatttttaaaaaccaagaaattttttttacattcctttcaaacaaagaattgctctttagaatctggtccagtgggaatcttactgaccatctgcaagaaactcacaatgtaatggtgaatgttggtgacagaaagcaaatttacaaaagtaggagacttatgtgtgatgaattttcctagactttgcatttttttctttacagtaataaaatgtcatctgttgagtatttttatgaaagtagtagttttacgggaggcatttatgccacttctttattgctgtcttttttcaataactttgtgggggtaaaagtggtttttggttacatggatgaattgcatagtggtgaagtctgggcttttagtatacccatcacctgaatagtgtatatcgtacccactatgtaatttttcatccctcacttcccttctgagtttccagtatccgttatactattctgtatgcccccatgtacttatagcttagctcacacttgtaagtaagaacatgtggtatttgtttttctgttccagagttacttcacttgggataatggcctccattttcatgcaagttgctgcaaaagacattatttcattcttttttgtggctgtatagtattccatggtttccatggtgtgtatacacacctgcccccctccacacacattttctttatccactcattggttgatgggcacttaagttgatttcatatctttgcaattgtgaatttgtacttcaataaacatgtaagcatgggtgactttttgatataatgacttgtttcactttgggtagatacccagtagtgttctggagtgaatgatagatctacttttagttctttgagaaatctccatactgttttccatagagattgtactaatttgcattcccatcagccgtgtaaaagcattccctttttactggcttcgtgccaacatccatagttttttgaatttttaatggccattttattctagaatataaaaatataaaatatctattaatctctaaagaagccaattaaaaattacttgctgtttcattggtgggtagagacatgctacttatttggcagttggtttaaataagttaaaatattaaggagaaggctagtggaagattctggtagaaacaaactcagcacttctgagttatggttttagatatttttttcccagttaagtaagcctttcttcccactctcagacccgtagaagaggtcaggtctgattcgggtaaatgtatttagccacctagcatatgtctattgagttattcaaagacttcatataatttattgcaagatttattaaaaatagactcattcatcaggtaggagctggttatatgtattagttttcctgttaattctctgtaatctgccacactttgcttatctgtcctattatttgctgatgtggatttgtgcccaaaacaaagggagctaaagagtaatatcagaagaaaggaaatagagggacttttagctttttactcatgtgttaagtatgtggcttttccagaatgagatttcacaagaatatgggtatcactatgccagagtatcctcactgttaacctattctttttttaatgtgattatctgactgaagggaaaacaaaaatttgttattatgattatatttttctttagaaagtgccctgcacttcttatggcgagagattgttacatctgagggtctgaaactctactataatccatatacaggctggtaaggcaaaattttacttatatgcttgatttaaaaaataaatataatgaaaaactgtctgagattgttagcatatctgtaactttgactctacctcatgaaggaatcaaaggtgaagtcttgattagacatatctatggataggatagatttagaattaatagcacttgtcatttttcagtaaatgaatttggaataatagacataaggtgcttagttatcaagactaaaagagattattatttaaagtaaaaatgttatcttgtttattatggggtcagttttattttttcttagtaatcattaaacatcatgaatgaatagtagttattgccctttgtatttttttttattcatagattcataaaggtcatagaaagaaggcagacgtgttctcttttaactaccactcatttctgcagagttacttgtcagctcaggcagtttttttggttatcacagttctaatgtttgtaatctaaggtttgaattgttttgccctaaaatatagtttcaataaacttagactttatgcattgcttccagttctctttaggaaaagtaattaggaacattgtaatttgtattcacattcctatgatgtgatttatcttgtttttttcctcagcatcattcgtgagtacccaaattctgggccgcagttgcttggtggaattttagcagatgagatgggtcttggaaagacagtggaggttttggctctgattctgacacatactcgacaagatgtcaagcaagatgctctcactcttcccgaggtaggwgggtatagtagggcttgcaaaagcaggggacatatgttctcgaaaagcatcgtatgttgaacatttgcttggcacttaagtcaacactttctgttcactctgtgggtaatgatttatattagtggttagttaacttcaagtgggcagagagaatggggtgtttgtgacccagaaggtttatttttgaagtaatgttggccaactaggaagagaatttgtgatcacttactgaactttcttctagttggcagagaaactcctttacaaaagtactgttgactcctcaaatgttttgtcactaataaagtctccatattactactaaatatttttaagagctatttaaaaatgttatacaaatctcatatatataaatcttagaaccaaataattagaactttgttaaagaacaagtagcttagtaaatagattgctaaatgaaacaaacttcaagtccttgtcccaaaatacataattgtgtttaaaaatataaattttagagttacagaaacaaagtccactaaggcaaatatagtatatagctcatattttctagtaatgaaatctgaaatcagcccttacattaaatcttgctgaaatgaagtcagtagttaaaggtataattataattaattacctctaggacccaccagtctcacagctttagcattatgttatctttcagtagggtcaagtttgcagaattagcctttcagatttgagtagaaaatttaaaaaaaaaatgttttttttgtagacaaatgacttggaatatattgacttaactatcagtaacttctttctgagatttcctactcattactattttaattccaagttattttcatattattataaattcaatgggttaattttatatttaaatatacctttaaaagttaatttcagaggttccacacataacatttaggtaatttaagataatatgcacaattttttaagtgatagctagctgtaaactcagaaataaaactgtgtatgtatctacagctatttggccctttctcttgcaatttttttagaactgttttgcatttccataaagaaggaaagttaatttcaataagcaattcagaatactgaaagcaaaacactgtgtaactactgactgttgtttgtatcagggaaaagtggtgaattattttattccgtcacattattttggaggaaaactgaaaaagacagaaatccagaatatcgaatttgaaccaaaagaaaaagttcaatgccctcgtaagtaagacatctcttaaaggaaataccttcttatagtgatctttgctagagttcttgcaatccttagagatatcttgtaattgttataaacaattgtttttacagttatatatgcttttgataaatgaattcaattacaagtcataatatcttaacaaaagtaaagatgtattattttgtttgacttggcccaggtagttcttgctcagtctgttatatttaaatctctttagcttacagtttaaaccaggctttatttatcttttaggaaatgaatgtttcgcatactaatggtagcgtatacttaaataattgtgagagttttcttttataattttgaatgattgttttatagtattaacaattcaatatgagtaattcttcctttgattatttttattacagtaatttgtttcttaatatgctgagatacatttttattacatattttttcaaaatggcactctgctgtaataaatctttgatttatttctttcttaactcagtcctcatgcagattaagattaaccaagttttactttcttttcattttaattattttgactgatttagcatatccttttacatttagctacacgtgtgatgatactgacagctgtgaaagaaatgaatggaaaaaaaggagtgtccatcctttccatctataagtatgtcagttctatatatagatacgatgttcaacggaacaggagtcttttgaaacggatgctgaaatgtttaatttttgaaggtctygtgaaacagatcaaaggccatggtttttctgggacttttacattgggaaagaattacaaggaagaggatatatgtgataaaacaaaaaagcaggtaacagagcttaagttcagctctatattaagtacacgtatgtgataccttactgagtacattgacagatcccaccttgaaactgaaactcttacgatctgaagataaaaaaataggaaaagtacttatatctgtaacttctactttctactttgtggatataaactccgtgagagtaactttactttggctatcattaaacctagagaataatgcttggcacgtaacaaatactcagatatttattgagtgaattaaaaaactagttggctaagcgtattatagagtataaagcatcttctgtattatttatttttattatttttttaagacacagggcatctrttgccctggctagaatgcagtggtcatagctagctgcagccttgaactcctgtgccaagctgtcatcttgccttagcttcccaagtagttgtgagtacaggctcatgtcaccatgcctggttaatttttcttgtttttttgtagagacggggttctcactatgttgcccaggcaggtctggaacttctaaattctcattttctttatattattatcttatacaatttctgcattttgttagaaaactgcttctgttgggccagtaatttcaatttgcttttaggaaaatagttataatatttgcaatcataaataaagattaatgacaacaagtcaaaatgtggagctaccagctcggccaccaagaaaaagacaaaaaatttattttctggagtagggagtctatattatccttgggtagcactgaagacagcagtgaactgtgcttttggtaatcctgctaccaccaaaactagaagatttccctcagttaatgccattgattacatgttgtgtcttaactcagcctcagccctgatatgccttggaggaagctgtccctattaactacctgcctatcatactcccactatgttgtacaaccctcttaggtattcccatagcatcattttactttttactgttctcacttttccagtagacccctttgaaaccgggggccaaatattgttcatatttgtgtccctagcatctaacacaactactggcacagaattggcatttaataagtaattgtaagagaggacatatgtagaaaagggaaggaaagaaggaatcaatttgctaattgcagtaaccagtggattatcttttactttctttggatgctatattttagtacttggtgtttttgtagttgccctgatttgtatatttatgtactcgaaaagtactagtcttgtattgatttaggtagactaaatcatagtaggtaaataacaaaatatcagtagcttcctttatctttctaatttttcatctctccaaatctgacacttgtagagccttccttttgttttgagatgaagtgagggtccttacagagggcagattggaagccacttatcaggagtgattctcctcagggaaaagggtagcaaagactggctgctacataattatatgaagtacttacataaagtcaggagtttaatttcagaaatgcaactagttgcaatcaattaattaaatatttttttcataggcagtagggagtccaaggaaaattcagaaagaaactagaaaatcagggaacaaggacacagattctgaatacttgccatcagacacctctgatgatgatgatgatccttactattattattataagtccaggagaaatcgcagtaaattgaggaaaaagcttgttccatccacaaaaaaaggaaaaagtcaaccatttatcaatcccgattcacaaggtcactgtccagctactagcgactctggaataactgatgttgctatgtctaaaagtacatgtatctctgaattcaaccaagaacatgaaacagaggactgtgctgaatctctaaatcatgctgatagtgatgtaccaccttctaataccatgagtccctttaacacctctgattaccgctttgagtgtatatgtggtgaacttgatcagatagatcgtaagcctcgtgttcaatgcctgaagtgtcacctgtggcaacatgcaaagtgtgtgaattatgatgagaaaaatctgaagatcaagcctttttactgcccccactgccttgttgcaatggaaccagtgtcaacaagagcaactctgatcatctctccaagttccatctgtcaccagtgggtggatgagatcaacaggcatgtgaggtcgtcatctcttcgagtcttggtaaggccacttggactaaagagggagaggaaaatgtaaagttttgcttcttcatgatagtttcctaatstttgtttctttgtggtttatcctcaaaactaactgaatgatttaatagtaatgttaaatcaaagcttaaagaaaaaaattgagactaagaactagaacagtacaatgttattcttttctaacatcagaatttcaccarttaaagcattttgagtataaagatgtggaagctttttaaaaattcttgagtatgtaaatgagaaattcttggtataagcatttatagtcttcagagagaaatgcaatccaaaggcagcactgtgtaataggagctacttatctgatctgccatctcttagctccaaaatcatcctctaaagcttcagttacctcagctgtaaaataagaatttacttatacagcaaatctttattgaccacttattatgtgccaggaactgctgagttttaaaaatagtatccagtcatttgtgaagatatgattttgtcaagtactgggcacatagtaatgttattgtttcctaatattaatacccttcactaatttcattcttccttctttccatgcaagtgttactgaaggtttttgtatttcatccactttacataggcatggagaatactgtaataagcaaaacaatttttgctgttaagaagctctattctgtgtgggtaggcaaagctttgagtcttagttccatcagttttgagcaagtcactttatttttcttatgtgtgggataggaatattaacaaccaccaacagaattattgttgaagtttggagataatgcttagcacagtatctgaaacataaaaggcatttcataaataatagctcttattgttctactttttcataccattgtgctttcacatatgctattgattccatcctcctacctacatatagcccttttctctttttgccacctatgagaacctttaagatatacctcaggttttaactcctctgtgattttaccttctccgctacagaattggtctttccactgtgatgctgtcatgttcacatttattacagtttgttgcacatcagttatgtaattcatcttccacactaaaacatgtctttctccaaacaggtatgggatctgtctcatagcatgaatgctcctaagaaaatagagaggacttagtaagggtataaatgagtgaatatttcattgcctttagtgagcctttttgcaataactgcctgtattgattatttcctaggtatatcaaggagtgaagaaagatggctttttacaacctcattttttggcagaacaggatatagttatcattacctatgatgtactgcgttcagaattaaattatgtcgatatcccacatagcaatagtgaggatgggcgtcgcctacggaaccagaagcgctatatggctatcccgagccccctggtagctgtggagtggtggaggatctgccttgatgaagctcagatggttgagtgtcccacagtaaaagtgagagtttctgcaaaatcttttgagggctggggaagaagggtgaaaaggaattaggggamcttragtagtttaatagtttaagcatagttaacctgtagtactgatattggtcaaaagtttgttattaaacactacttgtgcttttctcttgtgctttgaactacataaccctttgaaattagttctgtactctgtgactcattgctctatatgaaatatatatttttcagtaagatgtctgtttatatatgatgcagatcaaagtaaactgtgtttaggaacttctgtaagcatttctgctaactgggagctcatcgtgtagcctctgatagctttgaaccaaagttgactttgacagtcttttaaatcagaggccaaatggtaacagaaaatactactttagaggacagaattttgattcagcctttgaatgtcatatgtctttattctgttgtctttggccagtctgtaacctgaactgaatgtatgaatcatgtctgttagtatatctggaggatagagtgatgcagggcatggatcagttattcagggggctttttcattttgtacgtatttgaactacccctctgttttaggggactgcgtggcagcctcccactaatgagaaccactgtactggaagatggtccattgaatatgacattcaacattgagtgtgataactgttaaataaaagtaggtacatctcaccagaagtgtagcttttaatgggctgtttttcatgagtatgcctgacttctgtgttctttctgtggttttctggatttcatttttayttcatttttccctctcatcaggctgcagaaatggcccagcgtttgagtgggattaatcgatggtgtatcagtggcactccagtacagagaggattagagggtaatgtatggtttcctcacatattgcatgcatttgaaaagcttcattttttagagagaaaagtattgttatgcttaacctttgctgcagtccctattgaagtgatgattcatgtctttatagttgactcctaatagtttcaagcatttatctttttaaatgggactcaggtgatttttctgtttatgtatatgaggaccgatatatattaagaggtctcattgccttaagttgaacaattattgtacctgcctaaacagcatagatataggtctgaattaaaattagagttccaaagtcataggtagaaaacaaagaatctaacccaaaaagaaacaaagggtggggggggtggggagaggcagaaaaagagagaaagggaattaatttcaattaactgtgtctatgaaaatggagactataatttttattgtgtgaacccaggaatactagggccataattttagtaattatataagttattagtagtcttataatgtcacactatatgtatataccgttattgtttctaccattcctttacttgagcatttagattgtgtctagttttttcctcctctccacacgtgcattgaaatgatccttctaccttaatcttattcaatatcacagtagaacggacactgcatttctaaaacctttattcaagttgtgaatatctaaaatgaaaagtttaaatcttgttttatgtatttccctaaaagttgttattaaagtgtagttaaattacaaaatttaaacatacttggagttctgtagtaaatactcatcttcaaaacttatctttctgaaaatccaagttttcgtatgttttcagcagcataactcactctgctaaaacaaaaatctcagtatccattactttgacctttaaaagcagtgttttccaatgattatttttaggaggaaaaggttttctagtaatattttctagtatatatttaaatatttgcatcacttaaatgttacatttagatacatatttatagaataatattacgttcagtaaaggaccacatttagtggtctcctttcatgtttggaaactgtcgaaattgtaaatgtttaggcgttaataaggtctgagatcttacccagctcaaaagttagctgagagggtacagaaaagagtacatgactatcagagttactttttctcattttaatgttgagagagtatgagcaataatttcttagttcctgggtcggtttttttggagatacaagatgttggcaagtgttttgagcacctgtcaccattcaacaaattcctaattttttaaaaaccaactttaatgagctatttggacttcattgagatataaatgacatataactaaatgtttaaaataccacatttgaaaagttttgacatgtatttgtagccatgaatatatgtgcacaataaggcaagtttcgtcgtgttccaagtcagctccaaaagagcttttccagactttctagaattttgtctttcttcctcacttccatatctctctggtatctttctgattcttgcaattaaatgttttttttctagttgtcacactaggaatgttagcctgctcatgacttactctgttgtatttggacatggaagtctcatttgttttctttttgtgctaaactagggtttctcaacattggccatattgacatttggggccagataattcttctttgggaattgtcctgtatgctttaggatgtttagcttctacccactagatgctggtagcactcctacaattctgacacccagaaatgtcttcagaaattgccagactgaaataatgtcatctacttgggatgtcaaatatggaagaaygcttcytaactccttccacccgccacaccctatgtctacataatgtattcatttgtataatatagaaagcattggctttggggaatataaaaactggggtttacatccggacttattagttgtatgtccataaacaaattccttaaacatttaagtccttatttttcttatctataaaataaggtgttttaaagatgaattatgatgaagtatacaaaggatttagcayagtacctaacaaatattaaatattcaatgaatgatagctgcctctacttctccttttgttgtttttattttccatttatgtagtcatttatttattttaatgtcttcgaaagtattgactttaacaagtactttgtgatgcatttattatttcatttgttattatttatgtatttgatttatttctttgtgaggtaggatagaatctcagtcagatttttgctgttaggataccacagactggataactacaaagaagggaagtctgtttaactcgcaattctagaggctggcgcatctaagagcatgacactggcaactggcgaggatcatctcatggtggaaggtggaagggagtacatgagatagagagaagcaccaggggctggactcgctttgtaacaaccaacccttgagataactaacccgctcctgcaataatgacaattaatccactcatgagggttccaccctcatgactgagtcacatataattaggccccacctcctaatattattcactggagtttaagcttctaacacgtgaacttttgggggatacattcaaaccatagcagatgatgagcaaaagtacatacgatcccttatctattgagcttacagcttagaggagaacatacatttcttaaaatgtttcttaaatacttagataaatattaaattgcaattgagataactttcacaaatgaaaaaaaggaaaattctaactataacaggtttcattaaaaaaatagtttgttctataacatcatacaattgggatgctgacaactgagctgtgatctgaaacattaacatgagctaggtaaagaggaaaaggaaaaatcctctattgtagaggaaacagaaaatattaatgtaaatagatcatgtggcagaaatagcgtggctagaatgtaaagagctagggagatgatggtggatagagagactaggtaggtagagatgggaccatggaggatgttatttgccttgttaaagaattttattttttttcttaagagtagtaggagctattgaaaygatttaaacacagtggttgggggtcattttgtggttagatttgtatttcaaaagatcactctagttgcagtgtggagagtggcttagaagagggtaagagtggatgttaggatattaattgattgtctataagaagtaatctaggcaagtggtgctggcacttttgatttggactaggtttgtcctaaagataacagaaaaaagtggataaggcaaaattaacaagcctcagtgacagatcaggagataccaagatttctgacttgcataaatccatgaatggtgactggtttccccagtgaatactaccagaaaagaagcatgggccagtggctcacacttctaatcccagcactttgggaggctgaggcgggtggatcatctgaggtcaggagtttgagaccagcctggccaacatgatgaagcctcgtctctactaaaaatacaaaaattagctggacatggtggcagacgcctgtaatcccagctagtcgggaggctgaggcaggagaatcgcttgaacctgggaggcagaagttgcagtgagctgagattgcaccgttgccctccagcctgggcgacagagcaagactctgtctcaaaaaaaaaaaaaaaaaaaaraagatgaagcatgtgtgcaaaaagattatgaatttgagatttcggcaagttgagtttgagacggctttgggacctcaaaaaagaggtaacatatagcaattgaattgatttgagctaaaaatataaatctgtggacctttgcatagcagtgatgcattggttctttcagatgttgctaactcccagcaaccatcaaggtaacttaattcaatctaaatatttgttgatcatcttcagaataagtgttgtaggtgtgggaaggatatttttattattattttatggcttctgaagagaatatatgcccattgtgaaaaaatttgaactgtacataaaagtataaagaaaattacaacccggacatggtggctcacacctgtaatcccagcactttgggaggctgaggtgggaggatcacttgagcccaggagttcaagatcagcctgggcaacatagggaagccctgtctctacagaaaataaaaaaattagccaggcatggtggcacacacctatgatctcagctacttgggaggctgaggtaggatcacttgagcccaggaagttgaggctgcagtgagctaagatggtgccactgcactcgagcctgggcaacagcaagaccttgtctcaaaaaaacaaaaagaaaattacaaaattacactcatagtcttcatttgaagatcttttctatatagatgtttatatatttgagcttattctgcatgcacaattttatattcctttttttttttccacttcatatccaaagcagtttttcattaagtcctcacaaataaatatatggaaaactgtttagggtatgttaagtgggcaggtggaggggaatagaatataaaattgactgtgcccagtaaagagataaacaagaagtcccatgctctaaagctaacaaatacaaggcatgctgaatcagaaaagaaaaatagttctattttgtgggattactataatttatttatttgagtcatttttctacatattgttgctatgaatatcactgtgtaagtaaatcttatctatatttttattactctcttaggcttcttttctaggagaattattagataaagggtatgagaaatattgcatcagagaatattcttcatgtcatctgtgtgcttagaaattcttttttccaatccagcaaatcttgcatctattggtttcagagcatggtatttcttatatatgtcttaccaagtacattcagttgagtggttttttggtttaacttctgataacagtttcagatttttgaattaagtataagctgtatgtaatgaatggttgcataaatctaacattattttagcacctagcccaaaacctagggcagaatagatgctcaataagtataaatggaattggaattgaatttcagatttaagagcctatacagcctgtattttaattcatggaaagttctatgtgctgtgtaatgtctgtagaaaagcttctgcaaactagtaatgaagtaatagagttatcctcaatgtattttattttttcttttcagatctttttgggttagtggtctttcttggtattgaaccttactgtgtcaaacactggtgggttcgacttctctatcggccttactgcaagaagaatcctcagcatctctacagctttattgccaagatactgtggaggtctgcaaagaaagatgtgattgaccaagtcagtacaataagtttttattgataaaggtactataagagaaaagaaacaattgggatggaaagataaatttttagatgatatctttttttttttttctgctccttttcacagatccaaataccaccacaaaccgaagaaatacactggctccacttttctccagtggaaaggcatttctatcaccgtcagcatgaggtgtgctgccaggatgtggtggtaaaactcaggaagatttctgactgggctctgaagctcagcagcctagacagaaggactgtcacctctatcctgtatccattgctgaggctcagacaggcctgctgtcacccacaggctgttcgtggagagttcttgccactccaaaaaaggttttattatcaacttttttttaattgcagttggtatatcataatagacaatatttcaggcccacggtttcattcagagacatgtaactgagttgtcagttatctttaatggtgtagagggttttctttggtatggaagctcatttgcaacggagaattaccagaattattttcatggttttaagcatttctcttttgcagtgggtatggtgtttttttgttgttgtttgtttttttttgttttgagacggggtctcactctttcccaggctggagtgcagtggtgtgatcatagctcacagtggcagcctcaaattcctgggctcaagtgatcctcctgcctcagcctctcaagtagctaagactacaagtgcacactgctacagccagctactttttattttattttattttattttattttattttatttattttttgagatggagtttcgctcttgttgcccaggctggagtgcagtggcacaatctcagctcactgcaatctctgcctcctgggttccagcaattctcctgccccacccctccaagtacctgggattacagacatgtgccaccaagcctggctaattttgtatttttagtagagacggggtttcrtcatgttggtcaggctggtcttgaactccagacctcaggtaatccacccctctcagcctcgtgctgggattacaggcgtgagccaccacgcccggcctgttttatgtttttgtagagacagggcctcgctatgttgcctgagctgatcctgaacacctggccccaagcagtcctcctgtctcaccctctcaaactgttgggatgacaggcatgaaccaccacacctggccttgaacacttcttttaaaattaggattattgttgaggttttttttaaaattattttgttatttagggttttggctgtactccagatatgaaaggcttttgctcttattttattkcatagttcccacatcagggagttagattaccgttaaatattttctatctctctgattattcattctgagaacattaagaaatttgtgttcataatactctattgtcccagaaagtttttgtgaatcagactgcaactcaggaactggcctttggctataagagatagaaagaggattcagttttgtctttgcttttaagcaggttatagacaaataagggaaatgatgaaaattatagatttctaaaatatgaagtgaacatagtaaatttcaaaagatatatgaacaaattgctgtgtacagttagagtccgaaaacaatttatatatgaatggttaaggttagacagccttttgaaggaatggcatttaaccttagaggatcttcattttttactgattaaaaaaatattcaggctcaaagaggttttctaattaagttgcagtgctgggattcagagtcagtcttacatgttaatacctgtaatgtttcaaatatgtcatgctgtactttgtacttgaggaagatttttctagtttcattctccctttactgaaatgggaaaaacttaaagaaggatgtgatcaaataaaggtacttatgtgggaaaaaataatggtaaaaattgaggcgaaaaaaaatgctagagataccacaaaaactgcgagtctcatacactcttgatcatgtgagatataacactcccactgaagtcacacttgggattttctttctagttttgaacagtctaccttttcttttagcaccatgacaatggaagagctgctgacatctttgcagaagaaatgtggaactgaatgtgaagaagcacatcgacagctagtttgtgctctcaatggcttagcaggcattcatattattaaaggtagaaggtgattgctttatctctgattctttcaaacacttcctgaggaaggttaattatagaaaaaatagattttgatttttgggggggggatttttcccccaaaaagatactctcacacactactgaatatagtttaaataggttcaacttaatatagagcagtttcatagaacgttttgaaaaccttcaaagtttacatatgatttaaccaaacatttccatttttagttcttttttaaggaaatgaggatacacagatttcccttgaagttgttaatcttagactttaatagtttaatagtaaacaactgtaaacagtcaaaatgattagaaatagaaaaatggttaaattttgacacattaaaggaattattgttcattggtttaaaaataatagtttgtgggatcattttttcagcaaatatttgtgtgccacatctgatctaggtaacgatgatatggtaaataaagtaactctgatcttgcagaccttaaattcttacagagggtgacaagtacacacacaccctcccacacacacacacagaacgtatatgtgtaaagttatagtgttatatattatgcacaaaattaaagcaggttagaaagagcatcttatatttacatggaagagtattagtggcttctccatctctcacggatcactttttttgcattaggtctaatatcttacaaactgtcattttgtatattttgcctgttattgtagtttttgcagggaagagtaaatccattgtctgttactctatcttggctggaagcaaagttatataactggcacttttaataagcaccatatagacacacctttccatataaatatgagaaacattaaaactgtattccatagattcaagagtgaagatgaaacatgttaagtagaaaccttgaaaacatgcaatcaaacttctggaaatcaaaatttcaatgtctaatatagaaaattcacttaataaatagaagattagacaccgcctaagaaaaaaatcaataaagtcaaagtatagaatagcaatagaaactctccaacatgaaaaacgaagaagactgaaaattttgaaaagagcctcagtgaggttgtggacaacttcacatggcctaatataaatgtattggagtccccaaaggaaaaaaaaaaaaaagaaatatattgtgggttttatatcatgtaaatgtacaatgtgtaaaagcaatgatacaaagtctgtgtggggagacgtggatgtataatattgtaagattattatcctatatatgaagaggtataatattatatgaaggtagactgtgtgtgacaaggcaaagaatgtgcaccctacagccaccacttcaacatacaacaaggagttagaggtaataatccaaaagaatagataaaaagaaaaaataaaaaatcaggccaggcacggtggcttgtgcctgtaatcccagtactttgggaagccgaggcaggcagatcacaaggttaggagatggagaccatcctggccaacatggtgaaaccccgtctctactagctgggtgtggtggcatgcgcctgtagtcccagctacttgggaggctgagacaggagaatcacttgaaccccggaggcggaggttgcagtgagctgagattgcaccactgcaccccagactgggctacagagcaggactccatctcaaaaataataataagtaaataaataaataataaattaaaaatcttcaaaaaaaagaaaaaagggtgcaaaaaacaaatgagatgattagaaaacaaacagcaagatggtagatttaaaaacaagcttatcagtgatcacgtaaactgaaatggtctaaatatcccaattaagaggcctggattgtcagactggattaaaaacaaacaataaccatcaatatgttctctataagaaacctactttatatttaaagatgcaaatgtaagaggatgaaaaaagatatgttaacactaatcaaaagaacgataaagccactatatttctatcaagtaaaacagatttcttattaatactgcctgctaactgattgtaccactggaacttataaagtagatttcagagcaaagaatattaccaaggataaagggtgttactttatcactagagaaaaaaattctaaatattaacgtacctaaaacaagagtttcaaaataaatactaaaaactgatagaattataacgagaaataaacaagtgcgtaattattgtcagagatttctacatccctctctcagttatgtatagaataagtaaaaaataagtgagggcatacatagttcaaacaccgctgtcaaccagttgacctaatcagtgtttattgactacccaaccaaagaggaatatacattgttttcaagtacacattaaatgtatatgaagatagggcatattctgggctgtaaaacaaggcagtaaatttcaaaggattcatgcttacagagtgtgttctatgcccacagtggtagataccaataacagaaggaaaactggaaagtccgcaaatgctgtgaattaaataacacacttctaaacctttgggttaaaaaataaaagggaaagtaggagatactttgaagtgaataaaaatgaaatatcaaaatttgtgggatgcagcaaatcagttattaaaaagaaattcatagcattaaacatgtactagaaaagaaaaaagtttcatatcggagacttcagctgctaccttaagaaatttaaaaaaaaagagcaaatgaagtacaaagaaatcagttgcccaaagaaatgtgtgctttttgtagaatataaatcttcttacattaagcctctttgagtagcccgtctgtagttgttagctctttagcataatagaaccagaaatggaaagtgtctcttattgtgctagatacttgggtagagttataaggattctcagaagctgagcagaaatagctctagacaagaactgaatagggtgggcctacttacatgctgcagttggaaccctgtgaaatggtatatattgttcaagatttccgaacttcagtgtctttgtcaataaaatattacaggtgctttacttasctcaactattgttcttaatacaaaatgtagaagcacattgaaaacgttataaaaacagagatgaagaatgatgttattggttatggtaatatgaaggttacctcagattcttaccactttcaacctgctcacaatgtaaattctgttaycaatatctaatrgaaaagggcctattattatatattcgtgttaaattgttcacatatagtacacgtaactttgtgtgcaaatcttccctctagggcattccctagaaagtcctcaatttagctagcagtgtattgttgattattaagagaaatccgccaccagaaagtccattaatagaggatatgttccttctgaattgtaattttcaacttaattgtaatagatttgctgcttttagtttttattaacttcatagtaatgtgttaaacaatattcattttttaaagtaacattacatatataacttacataaattagattcttctaatgtgaagatcagacagtgaaggtctgacttttaaaagaaatctaaaattaatttcaaactctaaaaagatttgcttatattatatgtaaataaatacgtatgatacattaatacatattctgagattctccttgactggtattaaacacattttattattccaattttgaacattgtgttttctgcagatgattttcggagaaaattagcttgacaatatcaaatccaccagttttcttagaaatgttagcgccatcaagtggctgagaatgggtatttccaaatttgacttaaacctttataacattgaatatgggtttttttttaatcttcctcagaaagcatgtctttttaaaaataaacatgcaaaaccaggtattataacgaatagataaaattcagctgctttacattatagtttaatcactataccttctttaaaaggtatggtaattatgaagagaaaattgttaattgaattattctctacaaatggtagtataaatactgatagaattcataatgtcctttgaaaagctttaatcaagactcttaactaaaaaaagagaactcactgtgaagataattgaatgttaatgcctacgttataaagtaactttattattgtgaaaataatcttctcccttatttaaagggaatagaaattggctgactacagttctttgataatgtgtgttttagaaagctttgtattagctaactaatagaactagatataaagcaatggtataagagctattgttgcaaaatttattttaaattaggtgttttgcacaacactgaatatacataatgccactgaactacacacttaaaaagggctgagatggtaaattttatgtatattttaccaaaatcaagatatgtatgtaaacttatatatgagctaaaaacagaaccaacttcaaaatttacaaaggtttgcatatatatatatatctcattgtaactatgaacatggtcctaattacatgatattcataaaaccagcttgaagtttttttttaaaagaaagtatgtgtgatacttaggaaaaaaactttctcagcaaataaaagctagaacatcttgtacctttttttggtatggattgcatggttttgccagtgttaggtttttactttaatagtatttataatttacctgtcttgaattttacaagcagcagttaagatagattctattattcaagccattaaaaatgttcatctcttactttattgagatatcatcaaactttctgtgtaaagaagcagataatacataggcattgcaagccataagatctctgcgcaactatcagcttggctgttgtagtacaacagcagccacaggcagtataaaaacaaatgagcagagctaggttctaataaaactatggaccctgaaatttaattttcacatgtcacgaaatattttttttgaatttttttcaactatttaagaatgtaaaattcattctaagctgatgtgcccaacagataggcagagggtagaaatgacccatgggccatactttgccagactgtgctttaatcgatactttttgaattgctttatttgaatgaggtgctgattatgaacagtagaaaacagcatacatctcagaccatgatttgtgtgaccagaagaagagggagatccctgagtttctgacatgaagtttttaattgcaaattatttggcctaataccaagaacaataatagctaccaagaatactatatttttctgatcgctatgtgtrggttggttggagtgtcttaaattttttttttaataaataatctataattaccttaagtttatccttaatttcaaacatcataatgactactgattgccaccttttaacttcagcaagaggaaatttttttgtctaaattaaaagtttatccaatagcataatctcaaaacattacaaacgtttgattataaacatatttcagtataattttaaaatattataaatgtaatataagaacattatattccatggaattaaaaaaggaactgtactcagccttttttaaaacttgggcaatcatattaataccaagtcaaatttctttacttaaaaaaagttataatcattacattttatttttacagtattcttaaataatggacaactagatgacattgggaactaaatatgtgactctcgtatgctttaaatacattttaattctttaggtgagtatgccttggcagcagaattgtacagagaagtgttgcgctcctcggaggaacacaaaggaaaactcaaaactgattcacttcaagtaagtaaagactaaacagtttcataggtattctgtttgtttttttaacaaaataatttttctgaatgtttaagaggataaatggtaacaaacagtcataatcactgggtgaaacttgggattcagtcttctcaataagcattttagatgatttgtatgtacactaacatttgagaatcactactattccattcagggaagttttgggcacaagcctgacaaggtaagtctatataagctacagttaaaaatagctcaaagtacttgtacttccaagagtaggtcagttttatcactttgacatatgaatatcaacatatttattcacatggttttcattaaaaagaaaaggaactaagcaataaaatctatctaatgataatttttagaggtctttagggagatttggatattttaattataacacttatttctctttcccttcttggatctgtcattgactcatatagacaaggctctctagctaaataagaagtagaaatgggtttattaattttggcaagtttaggtttgagtcccaggtaagatgtcattaccattcacaatattgaccttgggactgactaacatgttcacaagtaccagagtggatatttagaggaacatatggaaaagtggagggagaggaaaaattaaatataaatctgatattctgcatggataagggttacaaaaggcaggtcctagaccttaacaccctgcccttgagtaaagaaaacaaagtagtagtactcagatttttttataggaaaagtatttggtgatatgatcttaatgtggtgttagtgttctgtgtgccatattaatattaggttctcttcagagtcttctgcattgactgtcataattactgcctttgatatgtttgtagagacttcatgctacccataacttgatggaattgttgatagccaggcacccagggataccacctaccttgcgtgatggccgacttgaggaagaggtaattatttttttcattctgtctataaaagtatattttcttcaaactttatgctccatatagttgatatatcctaggacatacaacatacaaataaatgtaatcatgttttcctgttactttgatgtttcgaattttgttgtgattttgggtagcagagaatggcagcagtacgtattatttggcttctctgctgatctacctgcagttatgtgataaatgcttgttgtagatatggctgttggtagccaacagaatgggatgtaaataaatgagttttaaaaaagaaactttgatctcatggcagatctacaaaagaggtagcttagtaaatatacaaacttttgcactttctccacatttctgtgtattttttaagggggtaaataaagtcaaatttttggtggtagttctcccaaagaagtttcctctacaaaaagtgtcgcctctttttgaaaagaatgacatcgaaaagagtgatattataaattattttactataaattgttaatagcttattatgcagattcttccagggatttttgctgttgttaaacattaaagagctaaaatcaaaagagtaggtatgtttgaaatgtattgaacctgtaagtggaggctttatttgagtcaacaggataaaaaatgagattatataaataagcacagcctttttgcactggttgttttgggggcggaggtgccctggtaaactattttaattaacaaaaattttatctattcatgagtagagactgatgttttgatgtatgtagacactagaatagctaaatcaaactaaatcaattacctctttatttttattgcatgcatgtgtgtgtgtgtgtgtgtgtgtgtgtgtgtagtgagaacatttaaaatctactttcttagggcttcagcatatgaattttggggaaacaaaattcagttcctaacacctgtgttactgtgtattctcaaggattatttttaaactgcagtaactaaggaattttaataactaaattagccaaattttagaaaggtgtctttgctttgcctatcatttgaaatattactgttctttttttcccctctttgcttattctaactaaaaaaaaaaattaaataagaaattggcaaacaaayattcggtgtttctgaaattttgttacttggacaagtaaattttgttaacttccatatataaggaatttttagcgtgacttttatgttstctacagtatacttggacttttatgtttaaatgcagttaagtagctttaaatgtrtaaaatgacccattcttcttgaaacatcatactgaattatattctwgattgggagtgaaagtttatattctctgtttcaacacaggccaaacagctgcgagagcactacatgagcaagtgtaatacagaagttgctgaagcccagcaagctttatatcctgtgcagcagaccatccatgagcttcaaagaaaggtatgccaaaatgcagtgtttcttacttgtatttgcctccagatatcattttgagttttggttttttggtggggagaaacttgaatttcttatacattttgaaatccttagcacctagcacattgcctgacccacaatacaagtttattttactgttagcaatgatttattggttgagtgaacagatgcataaataagtcaactattttgagttctctttcttttgaactcatgggttttctcttaccatgagtatataacagttgtcttttgaagaaagtaaagacttctataacctcctttttatcttgtttctgagatgttttaaaatgttaatacattagaaccacaggtatttttcctgcagaatatataccacttgtcatttctaaaatttcagttttatgaaatcagcagcaaaatctaaagaggttacacaaatacacttttattttcagtttttaaatcaggtgttgcaaatttttgtctttctaattcattcattatttagtattctgggatataattttgtgagttattgtggattattcattaagtagaatctggttcagttagttaaagattagaatgaaggctttctttcttatgctgataaagagacctgtgaccttttcacacatatagattgagtattgaattttcatttggcgtaaacagtttttttagttacagctttgttatataaatgcattcaataaattcycatttatccagagtagttaggaaataggggtttctctttaattatattttcaaaagaggaagcgagcattgtacatggaatatgtatactcgtctcccctctgtgatagtccctttgagaatagcatttattactttctttgaattttggcatcaccctgcccagtgatggaagcttagtgagtactaaaaaaaatgtattaattgattaactgctaccttttttacagattcattctaattctccttggtggctaaatgtgatccacagagcaatagaatttactattgatgaggagctagttcagcgagtgcgaaatgaaataaccagcaactacaagcaacaaactggcaagctttctatgtcagagaagtaagaaaacaggaagaaaaagtatctactcataaytttaaaagcaaagaaatccttgtattttctagtttctaatttctcattattaccggctttttttctccattcataaacctatacagacacattcatacttcttttttgcagccttttttattcacagtttatcaaaatggttataggtactataattgggtttaactcctaactgcgacctacctttgttactttagttactttaatattttacacttcataatgtgagcacattagtaactattgaaattatacaggaaaagtgcttggcaaagtgcctcgtatatagtgcataattacagatttaattaagtatatatacatatatatatatattcaaccaaggaatataactcttagccatttttcttctttcttcccaatattctgcttttatgtttcatcctgcaggcacctcctcatatagagcaaggatgtcaggaaggctatctgtagtcaggcttaaaacggaagaatgtggcagtcgtacactttcaaagatatctgagacagacatacatttttcatgctctttttcagttcctgagcacaggactatcaaatttttttggtatcttttacggtagacagcccaatattatactttgaatacaytctgaaggaaaactcactcaaatgttgctgttaaaaaaaaaaaaaacagcaaacagtttctttaacactttgtttggcaaccattctctgaatttgaggaaattgacctattattyttttctttgtattgtgtgtggtgctggtgtgggaatcaggttccgtgattgcagaggtcttcagttcttacttacaacacaaatggaagagctaaataaatgccagaagctagtaagagaggctgtaaaaaacctggagggacctccatctcgtaatgttattgagtctgcaacagtctgtcacctccgaccagccagacttcctctcaactggtaggtaatagaagaaatcatacaatgaaatggtaccatttctttaagctagatttcttagagaagaaacaattgactcatatagtaaaggttttttcattttaattgagacagaagtagaaagagatgtattaatctaatttaaagaaaaataaagtctcaaggacaaggtatgaaaaaccatgtgatttgttttttctaaaatggcatatctagtrgaaagaaaaatgaagtcaaaatattaagcttctccttaaaattaccagattgctggttatgtttgtgaatatttctgttaatctcttttttttcagctgtgtcttttgtaaagctgatgaattgttcacagagtatgaatcaaagctattttccaacacgtaagttctctatttgattattacccatcaagaaaatgaaacattttgcaagactcagttatgtgatataagactatgttttcccccacagtaacctttattatattgtttctttaattaaattgattagtacacctttggtatttgattgtttaatatgcccagttttacctatccagaagttatcccctaaatgttcatagtgtagtaatatataattaattgagatgcagttttgtggagtggtaaaatcccagactctagaatccagtggatttgaattatacagattttgctagcattttactgctattcaaggtagaactcataatgtccggcataacttcttcaagaataaagaatgacacaatcaaatatgttattactttaatgaaaccataagtaaacattgtcacaaacacctggattctcagagggaagcttgttagaacaataaatgtgtccactttcatccaggtatattactattctattttaggtcaaatctttttctgttattactgaagtaaataatacatttcttcatgtttctgtccaaattctgtttatttatctccaacagatataacttctctaaaatagaaattttcctcacatatttccttgccaaacgttcacttctgcatgtcaaggaagaaaacaagatttttgtgttgttatggcaaatgaatcagtagctttctgtttattacagtggatataatagaatttaaaaaaaaaaaaactggccaaatttatgatgttttcagctttttcaaggttgctttggtttttccaaagacttgcaaacatrttcttttagaactcacattgaaggttgcttttcactcactgataccagttactgttgttttgttctggtatgttttcagagtcaaaggccagactgcaatatttgaggagatgatagaagatgaagaaggactggtggatgatcgagcacctaccaccacccggggtctctgggcaataagtgagacagagcgatctatgaaagcaatactatcatttgcaaaatcacataggtttgatgttgaatttgttgatgaaggaagcacttcaatggatctctttgaagcatggaagaaggaatataaggtatagtattttaaaacttccttccaaaattaaaaattcttcttttttacatcaattttaactgctacttttttctctctccagttttttaaaatcttcttttgagattgaggtggcataatttctctttgcctgaaatgtaactgttgtaataaaggatagcaaataccataatactcaaagacattctatttattaaattactaaaagaaaatcattattaaactggaacttatatgaaactttttgtttagccgtgaaagtgtgttcattctattattagcttgatcttccactgctattatatgaaattagagttttgtttttgttctgtgaataacaagcaagcatcagctaccttaaagattggggaacatagtaaatacttcttatcctataagtttggaaaccattccaataaataaagcccgatatgccctttcatatttgtactttaatgattccatcatattatacctctgtacttgagatttcacaattcattaattttcaattattgttttatttggattagttatccattgtactgctttacaggtgacataggtagaggaaggaaagaagtgtttttttataatgacatttttattcaatttcttttttaaaaagtcttgctttttaaagtaggataaaaatttttatgcagagagatagttatttgtactatcagttcatatgtcataaattggggaatacatttataacatcaaaatcattggtttataataatgtttttctcacacattactcatgtgaatacaaagcacgttaacacagttaattacagtaagccttggaagaagtgttacttatgatgttcagttgcccctgtattcttcctttcgactcagtttggccacataccctttgtccagaagagagcttactgtgcagttctcccaggtcttggtacatattttctgcataactttgcagaccttttcacagaagagcaattgaatgagctcctgctgtacatatctaccagatctacctcaaaatgtaaagtcagtgaagagagcctgtcaaaaaatgtatacygattgataccatttctgtgaatttcagaaacatatataactgaattattaagaatatgtttcacatagtataagttcaatgaaaagtgtagcaggataagtacaattcagaatagtggttgccccatggttgggtactgaaggaggaatatgtgaggaaagagtgatacagttgagaaagaacacacagagcctttccaaggaattcatattattctttcttcaattaaatgatgagtacttgattgtatattttagtattcttgttgccatttatacatagttgaatatgtgaaatatgttataataaaactatttttaaaaaataaaacaagagattctgtcagcctaaaactggactttataaagatttttggtcttagcaagaaatctttatattctgttactgagaatctaaagaggcagtgtcctatagagatttttttcattcacatttcatcctaaaaatgaccccaggaactacttgtacgttagacacatagcgaaaaagtgtaagatctcattgaagacttttgcttaaggcacatcttggtggttttaaccagttttaattacatgctttaccactgtgtttgtcttttctattccttcagttgcttcatgaatattggatggctctgaggaatcgtgtgtctgctgttgatgaacttgcaatggctacagaacgactaagagtgcgtgatcctagggagccaaagcctaatccgcctgttcttcatatcattgaaccacatgaggtaattggcaagtaaatcacagaaaagggaacagcaagcagatgtcacagatatctaagacccatagaaaaggcagaatcagggcactgagctctactgtaagtgtgtatttaatctccatttttaatttgacccatagaaaattgtctttatagaccaaaaatggtcaaagatgagcaatttcatatctattacatgcttagtgttcactattttggggcatcttgtttctctccaggttgcgcattcatctgtttttgagtttaaaaccttgtatgtgcttaagaccaatagatattctcagtcactttttagacatttttgtcacctcagttttatcagaactagaaaaatcttccttaaaaacaactgaaaccttttcttttgcagtgtttcttttgctaatgatgaactaatattaacaacttaccttctaataactttgtctttgtaactcaggtttaaaagcattactccaccaatctcttttattctccattaaaagatattatttcctttataattcatttttattccttatttgtttagtgccttaagtctgtttctgtacagcttggagactgtaacttggaaaaatgtagatatattcattatatactatctcacttaaatgtgaattctgaagaagtttttctgagaaaataaattcgtcttgtttgagtgttccttctctgtctgctgtattctaccagggggacagaggaaagaagggcagagaaattctttcctggatttcatgaaatcactgaggccagagcaacagatcatttaacttttctttatcccgtgtatgtattactgaaaaaaatggtacataatagaatttgagtttatttttatctgacttcaggtacatagggacacttcctgtttaaaagaactctgcattgaattgtgcctttcataaagcaaaaaaaaaaaaaaatcatttgaaatatattatctagtatccattttgaaaacttgtgttttagaatgtaaataggttttttttaaaaacaatacatttgtattactggagaattgtccatatttaatataatttaactgtctttctgaaagaataaagaagtttttatttttattttctttaggtagaacaaaaccgaataaaactactaaatgataaagctgttgctacatcacagcttcagaaaaaacttgggcagcttctttacctaactaatttggagaaggtattgtttctaagacatgctrctttttcctatgctgcattatcataaaccactttagtgactcctttcataattaatggtgcaaattgttgtaattagtatttggtgttatatgagtcagaacactacctatgtctctacaatagcttcagagatcacaaaagaatattgtatctatagaaatttattatgcagatgatatagaaggcatgcactcgatagtagagaacaatgtaaatggactgtagttcaaagccttgaatagtaaaagtattaaaacatatctcggtgaaactggcataatgcaatttatacacatgcattcattcatcaatacaaaaatatgttgtaatttgttatttgaaactgaagtgtgtttcgaaagctactaaatcagagtacatggtaataaaggtagacttcaaatattaagtaattcaaaacacatgttctgagttatgatctgagtattatactggacactgatgaattggtgggtcattgattaaatataatttcattttattgcaggaattcatattttgctagttggcagagaaccttctaggggcaagatatagtagtaaatatttggatagggcaagtgaggacaagatatagatttgaattcttctggaaactggtataacatatacttaagtgaatcagtaaatctcagacaaaatgaaaagttagacattcattatagatatagcatggcgactaagaaggtagactttggaactggacagcccaattttgaatcgtgactcaactgttttctagatatgtgactttatttaagttattcacctttcctcgcatcatcagtaaaatgagaatgatgtcaacactactttatagtatagggctgtcttgaggattgtgtgaattaatacatgtaaaatgctagagtagtttctgatctattaagcactttctaggtttttgctgctattaatattattaagatcattattactgttatgattaccaacacttattctgaaagataaaaagaagaaaaaaattaaaaagtttcatgcaaattgctaacattaagaagataacacaggctgggcatggtggctcacgcctgtaatcccagcactttgagaggccgaggagtttgagaccagcctggccaacatggtgaaaccctgtctctactaaagatacaaaaaattagctggaatggtagcacacgcctgtaatccagttcccaggaggctgagacaggagaatcgcttgaacctgggagacagaggttgcagtgagctgagattgcgccattgcactccagcctaggcgacagagcgagattccatctcaaaaaaaaaagataacaggaaaaatgtctcaacattcctgaacataagttttttaaatgtaagatttctatactttaaatatgatagtcaaaataaaaagacagttatcttgtacgtcattgtttatatgttaaaatattttttaaaacctaaaattttaaggatataaatattctacctaagaaaatccaatttggctgttaataaaagaaaaagcatttaatctataatgatggaaaatcaaattacacaggtgctattttctgccaacaattaggcacagattttttaaatgattacacaccccagtggtgaaaaaggacagggaatggatacattttatgcattaccaatggaaatataaatttatataagcttttcttaaaagcactttaacaatatctgtcaacaattttatgtaggttgaacatctcaaatccaaaactggaaatgctccagtgagcatttcctgtgagcattgcatcagcactcaaaaagtttatgattttagagcgttttagattacagatttttggatttggaatgctcaacctgtatgtgaaagaaaggaaaaggaaaactggacaacataagatgaactggaatctatacagtaggattaaatgaacattatagaactgcagaaatacagtatctgaaatcaaaaactcattggagaccagacacagaaaaagatgggattcatgaactcaagtacagtacaaatgaaaatacccaatttgaagtggcatagatagaaaaagaacaaaatagggcaaaagagatttgagacacagttgtttgatctagcatacttgtaatttcatagatctagcatacttgtaattgaagttcaagaagaaaagagaataggacagaagcttgaagagataatagctgagaattttctaaaactcataaaattatgacaaatatcttaaagattcaagaagttcagaaacactaagcagaataagtaaagaaaaaaacaaaatactgcctagatacatcatagtcaaactgctggaaaccaaaaataatgaaaaatagaaataaaaaaagttgagagataaaacatttaatacttacaaaggaacactaataaaactggtggctacatagagatgtttttcttttcacctttaaagatgtttcggtattttccatagtttctctatgtaaccagttgacattggaacatcttcaaaatgctaaaagaaaaaaacagccaacctagagttctatacttaaagaaaatttcctttttttaaaaaaagtgaaataaggatattttcagacaaacataaactggaagaattcatctccagtaaacacacatcacaataaatattaaaggaacttctttggatggaaggaaaattatttcagattgaaggatgcaactacagtaaggaatgaagaacaaaagcttaaatatgtagataaatatgcaaggatattgactatttaaaagcaacaatgctgtcttatgggttatacaacttatatagaactaaaatatatgtcagtagcacaaaggaaagaggtaagcagaggattattaagatttaatttaatttatttaaatttattaaaatttattttattataattgtattataatatttatatttataattatatatttataattctgccaaaatatatttataattatattttattataaatttatttataagtttattaaaatttataaaatttattaaaataatgtaattattttaagataatttaatctattttaagattccttcagaggaatggacaagaaagtccgtaaggatattgaacatttgaacactaatgaacaaatatgacccaactgacacagaccattacacccaacagcttcagaatacatattttttaggtgtacgtggaacatttatcaaaatagaccttatgctaattcaaaaagccgctcttaaaagtatgtgagagtatgttttctgactgaagaggaatttaaaccagaaatcagtaatggaaagataactggataaatccctaaaagtttaatagaaattgacaggatacttctgaataacccatgggtcaaagaagaagtcaaaatggaaattagaaaatactctgaactgagtgaaagtaaaaatatgtgacagtgcttagaggaaaatttataacttctttaacttaaggatctgcaaattaccatgcatgggaaaaattcagcccgctgccttttttcgtaagtaaagttttattggaatatggtcacactcattcatttacgtattgtctgtggctgcattcatgccacattagtggaattgagttgttacaacacagatcatatggcccacaaggcctaaaatatttataatctcaccatttatataaatgtcaactctttattgacatattggaaaagaagagctgttgtgaattatgatagattgtttacaaagtgctacagcaatgaccctcccattcttgttgctctttggaactccatgagactatctcaaaaagcctagtttactttcttgagcagcagagccctcagctcagcccagccctccctgcagaccagatagcctaccaactgccaaacatgagcatgaggccatcatagaccatccaaccccagccaactcagcccatccccaaatcacctgtagaatcttgggaatcatatgtttgttttaagccactaaatttgtaggtgatttattatatgtaaaaaggaaaagtggacaacatagtaaaatgaattggaatctatatggtaagatcaaatggacattatagaactgcaaatatatacatacattattgatttacttataaaaatcaataattaacagaggaaaagaataattcattggttcaatttgtttaaatgcctaatctgaaaatctgttacctgaaatgctccagtgaacatttaccttgattgtcatgtcagcactcaaaaagtttggattttggagcatttcagatttcagattttggattagggatattcaacctgtgtgattaaaattgttttcatttttttgttcactccttgaataaatgatatttgtaaggaagtctcaggaataatcttgttaggtaatatagagatcgatgggtcatctaaattgttagattatgtaaattgtaattgccagtattcacttccataaatgagttgcaaaacatatatcaggttttatatgtaaaaacgtaactaatatattttttaattcttttttggatagtctcaagataaaacatcgggaggtgttaatccagaaccttgyccaatctgtgctcgacagctaggaaaacaggtaaaattatgataaacatcacatgcatttataaaataccttacagttttcaaaggtttctacataaaatctttctctygtttttctcaccactagtttctatgaaaggcaagtattaccattatcttaaagatagcactagaggttaggtgacgtgcttaggattagatgtttgagcaatgcttttcttaaatgggaagtgaaaaaatatttctagaatgaygccatctttttcattaaagatgcacagttttgaacattgtttccagtcacaaggttgtgtccagtaatttgacttcgtcaggttaacatagttattcaataattatacagaaatgtaatataacacacatagatttacttaaggtattacattagtatagaatcgtagttcttacttgccagtattaatgtctyataatacttgttcttcagagtacaaattaatctctcctagggaaatttagatgtgattttggtagaccactatattaaatatattcctttgtggatattagtatacataatgtctataaacatggtagaaccatattctcctctaggagaactgcaatttatgaaaatacaagtttctgctttctatgataaatctatatatatatatatcagactattcattgctcttgaaaatttgaaagataagcctattactgttgaagaagtagaaatagtcttggctgtttttttctatggaactgagagttgaaaggtaaatatatgcattccatattctgaccagtaataatcaagaagaaagtaccttttggtttctaagattggtggagaaggtgagatcacaagaatactttatttgctaatacatcttaaagggagagatactacattggaaactgagcaaaatagtactgtacaaatgctggttacttctgacaaaagtcagtgatgaaactgataaaagttgtgataaaaatggaagaaatcatgacataaagtagtattttttgcttttagttttgataagatttatacaactggactgtctcagatatttcattttgtcttaaacattttcagtttttaaagttctttcatatacattagttcatttaattctagcataacctaggtttcctgcacttggaagaccatattggatttcaataatagtaataaaaatacttttcaagctctgttcatacttacaatatatagtagccgtatttttttttcctttttggatccccagttctccccccttctaatttagggctattaaattagaatctatcagagwtaacccatatgtaccagctgatgcacctggaggcattgccatttgtctcttctgtttgggtcagtcagcttcctgtcactcctaatggtcaggtgccaggtatctcgttgcttcttctccattgcacatgtaggtggacctgtcttgatgtttagttggtccattttgagctctagtgagtcacaaaactcctttccagtagagtaccccagtggcactagaggtacataaagtacaatatagtgctgctctgtgtcatacaaaaatgctrgtaaaacagctcttcaatttcattagtctcaactcctgtggactctggcagaggtgcagctagagaacagtaggaatagtattagctgwtaataggcaaaatagtggtttgaaaaccaagcttatatacctcagttttctcttctttcaatgtgagttcttttccaaagagcatcttagatgatccagcaaagaatctcaagtgggccaggtacgcactttctttccatacatgtccaaatcttaaaaaaaacatagcttaargatttagaagctttgtcactcaaaagacactcagtttttcttattgtttttaccagatgaaaacggttaaaactacatttgtaagatgccatagcttttagaacttacacctagactaaatctattgttcttacgtctctcgttgccaaagagggcaaaagtctccatggtatgttgcagagattcagagaggattattttatttttcccgaataggacaaggggtttcttaaacatttctttttggctgggcgcggtggctcacacctgtaatcccaggccgaagtggatggatcatgaggtcaggagttcgagaccagtctggtcagtgtggtgaaacccctctctactaaaaatacaaaaattagctggtcgtggcagcaggtgcttgtaatcccagstactcaagaggctgaggcaggaaaattgcttgaatcctggaggtggaggttgcaaggttgcagtgagccaagaccgcatcatttgcactccagtctgggcgacagagcaagaatgtctaaaaaataatagtaataataataatttctttttgtttgtaattttttaaataaccagaaccattttcaaaataaatttgagatactatcccatattattttctatataagtgctttaatgtgtgaaaatataaatctgttttttaaattaaatggaacatatcgagtatgatattatctccaaattaatattctaagtccctctgttatatctgttgttagagtgctgaaggactaatttacattcttcccaaatacagaaatgagaacaccacctttctacaaagtagtggtgactgactatcatactcacttttaggataaacagaactaaagattatgaaaacttactttggaataaaaaattaatttgaaggcacaacttggctttatgacaaagaatattaatgttatgaaatctttaggaggaaaaattgcgaatctctttttaatatgcttataaattgtaaggcatctttgatagcactaaggcttgttctgttttctttttagtgggcggtactgacctgtggtcactgtttctgtaatgaatgcatttctataattattgaacaatacagcgtgggatctcacagaagctccattaagtgtgcaatctgccgccagaccacatctcacaaagaaatctcgtatgtctttacctcagagaaagcaaaccaggaggaggacatccctgtgaaggtaaagtaggtcaggaacacatagaagcataggtaaggcaatataatataggaagcagtatctgattaagaaagcatgaacatcagaacaagcttgacagtgaataggtagackccactgttgtctgtagatacactgcctgaaagcctcagcttaaccatgtaatttttaattgtaggaggaacacagaacacttattcaaacatggttagcgatagtcatgtacactgtgactaaaatgtaacatcttaaaattacagtttcctatcctctataatatttctatccaccacaagtagacagaggtctggttacattagagatttatttaaagaaagagttttcctcattcttttacacatccctgaatgtaaggaaaaaaggatgtgtctaactaaacagaaggataaaataaattggctaatgaagacagctacaagaaagagggtaatgtgctttttaaacagcatagattgatattccaggataaagccaaattttggctttattttcctaatttttttccatgcttcattcagaattttaagaaaattactataatgtgatatccagactggatctgtaattggatttactgcttttaaggggtatttaataaaaagccaagactattttgctctttcttttccttaaatatgcttttttaatattttttttctaaccaaacttgaacaaaggacacatcggtatctaaatttagtagcaaatgtgggctttaaggaatagagaatgagaattagagaatgatggggttgactcttaagcaagatgaagtattctttattaattccttctgagtttttgatactcctcacttttaagtaatgtgttttttaagtagaatcagctacaagttgaaattcactaccagtagttaagcagttattagggtacccttctcccaagaaaactgtagctgcattaaagaacttttaattgctcttttttcactgttatttgagtaaaacctgaaaatatcagttatattgctctttagtctgttgggataaacagaattccacagttagaataagcattcatccattcattccacacatatatattggacacgtactagcacacaggcagtgtgctaggcctcatagacrcagcatacacataaataaaacagatatggttactacttttgtggagattggtgaaggagtttgagttggggcaggaagcacagatgttaataaataatgtgttataattgtgataagcactrcaaaagaacaaagctggaggcatcatgctacctgatttcaaactatactacaaggctacagtaaccaaaacagaatggtaccaaaacagacatataggcsaatggagcagaacagagacctcagaaataataccacacatctacaactgatctttgacagacccgacaaaaacaaacaatggggaaaggatcctattgggtaaatggggctggaaaaactggctagccatatgcagaaaactgaaaccggaccccttccttacaccttacacaaaaattaactcaagatagattaaagacttaaatgtaaaacccaaaaccctaaaaatccgagaagaaaacctaggcagtaccattcaggacgtaggcatggacaaagacttcatgacaaaaatgccaaaagcaattgcaacaaaagccaaaattgacaaagggaatctaattaaagagcttctgcagagcaaaagaaattatcgtcggtaaacaggcatcctacagaacgggagaaaatttttgcaatcaacccatctgacagaggtctaatatccagaatttacaaggaatgtgaacatatttataagaaaaaaacaaccccatcaaaaattggacaaaggacatgaacagacacttctcaaaagaagatatttacgtggccaacaaacatgaaaaaaagttcatcactgatcatcggagaaatgcaaatcagaaccacaatgagataccatctcacaccagtcagaatggcgattattaaaaagtcaacaaacaatagatgctggcaaggctgtgaagaaataggaacgtttttacactgttggtaggaatataaattagtgcaaccattgtggaagacagtatggcgattcctcaaggatctagaaacagaaatcccataggacccagcaatcccattactgcatatatacccaaaggaatataaatcattctgctataaagacatatacacacaaatgtttactgcagcactatttacaataacaaatatatggaaccaatccaaatgcccatcaatgatagactagataaagaaaatatagtacatatgcaccatgtaatactatgcatccataaaaaggaatgagatcatgtcctttgcagggacatggatgaagctggaagccatcatcctcagcaaactaacacaggaacaaaaaaccaccacatgttctcactcgtaagtgggagttgaacactgagaacacatggacacaaagaagggaacaacacacacaccagggcttgttggggcaggggagtaaggagagggaactaagagggcagataaataggtgcagcaaactaccatggcacatggatacctgtgtaacaagcctgcatattctgtacatgtatcctgtttttttgttttgttttgttttgttttgttttttaaggagaaaaaggaaaaaaagtctctgagggaatgacagttaagcaggtatctaaaggatgaatgatgaattagtcagcctgaggagagaataggttggctcccagacagagaaaaagaaaaccagaagagagccagtgcatggaaaagcctaagacaaggactcaaatggatctgagtggctgaagtgtagaaagcaaggagaaagcagttgaataagcctggagacctaactaggggaccagatgttgaagggccacctgaacatttgagaattttatttttatttaaggagaaagccattaaatattataagcagggatgtatcatgatcaaatttggatttcaaaaagatctctcttgtgtggaaaacagatgatgaggaacagaatagagcagaagaaatttggagagagcagcttaggaggctacagcaggagtaatggtggctttgatttggctgatggcggtagaaatggagagaagtgggtatattctagacatgtttagaataaagttagagaatgttggcagcattagtgaaggaaatttcatagatcacccctggtttctgatgtgaataagcaggtgggtaatggtatagctaatgatacaagatatttggaagaggaatacatttagacatatcatatttaaggtgcctaagacatccaagtagaactatccagaaaagtgttgatatgtggagctggagatacaaaattcggagtcactaatagaaaagtttgcttcagattgagtcctatgaagtccataactttaaaagattgaatcaagttgggagggctggaaaatgagaaggagcaactagggacaggcaatccaggcaggtacgctggcaacaaagaccacagggaagctctgcttcggtgaggagacagtagtgctgaaggtggatcaactacaatgtggactaatttgtctaatgaggtcactgatgactttagaaggagctcttttaatacaaatgtagaggcagaaagcagattgggagggattgcgggatgagcaggaagtcaacaagtagaaaaaatgcccaactgtttcataaacttaactgtgagatagaatcagaattgtaaccagaacctatgaaaacagaaagacatcacttttttgttgttgttctgtttaagacaaaagattcttgagcatgtttagtctccagtgaaaaaaggatagactgaagatataggagaaaggataatttgtaatacaagtttcttgaaaagaaggagaatgttgatgtatagaaagtagagtttcattgaagtcaaataacaggtataaattgggctattgagcacaaaagatataagcataggtgttcttatctgagaatgggagatcatagtcattccagagaggacaggcctgccagatgtgactgtagaagtaggtgactcaagtgaggtggagaagaaaagatgctagaagatgaaacagtgagacctgaattttggatgagctgtccaagcagacagtatgtaatatctagagttgaggtatagagtaaattaggcaccaaagttctttagtgaatgtagggtagggttcaataaattatagcaaagggtagagttgggataactgggcttcagggggctcaaaaaatggaagttgttacacaaatgagaactaatgctctgaaacctgcatttgtggaccagcactcaaatgcaacagtcaaatccttcactcaaaagggctgctgagagaccagtatgcttagaagatagccaggttctaattaaagcagggaagtgaagagcagtatttctacaagaggtagaaaatatgaaacaatttgtttcataaaatacgggttccagggggcgccagtgaaaggtccaggagtgaaaggagaaaaattagagggtaaacaagcaggaaggaagtgcaggacagtatgggaataacagaacaggcaaggatacgtgatgagagcatcatgacctaaggatcatctagtcctgttccctctctgtgaatcccctgaatacattttacagtcagccctgtgtatctgtggatatagccaaccatagatcaaaaatacttggaaaaagaaaaattccatgaagttctaaagagcagaacttgaatttgcagcatgctgagtttacattgaatccacgcaaatgcaatgatgtgtagggattatatgaggtaatctagagatgatttaaagtatacaggaggatgtgtgtatgttatatgcaaatatgacatcattttatataagggccttgagcatcctgggattttggtatccacaggggttttggaagcagtcagtccctcacagatactgagggaggactatatttttaaagcaaataccaaagagttattgaaggaagaagtaggtgacttatggtgcagccctgaggcatttgacagttattctttatcctgcctgcacttaggagctatgctgcttcccagtccctctctccctttcttcccactcctatagtttctcctttcctttccataaagatagtctttcttagcccttccttttttctcttctttctcttcctctggccacagcatctcaagggccacagatggcctttgtggctaagaagaggtggctcacccttaggtgacagcatgcatcacagtacaaggaactggcataagaaagaactgctgtgtcaggttttgcgcagagaggttaaggaagtgattgctctagctactggtaaacagcacagcctctacgaaactgagtcattgagcccatcaaatccaaacacctgttcattttatggcagctttcctagacacccaggatagagattggcacagttacatgtgctgtgctgttggagcagggatatcggtatataaatactgtttattgtgctctcacttctcgctgtctttcatgagtattgattaacacgtgaattaactgaagcatcttttaaaaaaaattaagtttatagaatttactaaagataatttccctttttatcatagatgcacatgtaattacatttccttttcttaaacataagactattgtaccattgtgcgggcaaattttatccctcctcgacgttgtcacactgcttcacgccatgtttaggttggctcttcactgctttttctgttaccatttgtgtctgccacatttgccttgtgcttcctgtctcttcttctgacttctgtcacatttctggcctgctgtctgtcacttcctccttgaaacatcagcttattgtattctgagacttcacccctctcttgtgactctttgaaacttccayataaatgatcatattgcctattttggattagtatgtaaataaagatggctttgtgtaaataattaaggcattattttcaaattttagaaactactagttccaattatttctaaacctagtttttttctttatattactgttgattatcaaatcgttgttctttaacaagcaatactgacaagtaattttttatttaattgaaatgtttatattatctgaaatataaaatttatttctgaaatgattatttcactgtatttatgtcaagattctcagacatagcaaaccatatatcgtacagaatgcttaatcatatagcttttttgtggataaaagatatttggaaakcataaaactattatttattagtagtagacatttttaagtagtatttcttggaaataagagattttacaatgtaaggaatgctgttgattgaccatagatataaaatgaatactgggatcacaaatgtcctgttcggtggatgcacttaagttgaagaccatttcttccctagcaacagtgtgatggtattcctaaatgacctttggaacctactgggcatctcacaaagtaaacaaaattccccttgcaagttctgacaactgccaggcattttggatggtgaagtaggcctcctggcagaacatatggcccacatgtcttgttccctgtgtcttacatttggctaggttttatacaaagcattttgccagtggaaaccctgaccctatatactggtcaagagtcttagataataagaaatttctgtccgggagaaaatagatacagccactacatagatatagtgacagcaatacagtacccttcccacccaccacatgctacacaattgctttttttgtcaaacttttaagtatgtgaccatcaactggcctgctttttaaaataaatatttttgttcaggctctgtctccataaactttgactcattagacctgggatgtggtccagaaatctgcatttttagcaagcatatctcttgataatagagatatcttatacagcctttttgtagagaaaaaaactctgtatctctacattccaactcacagagaagcctagccatactatgtgtagaattctacatgtggaattctattctgttttttttttatttgaatttttgttcatttaatttaaagatcatttgtgacatctgtctcacacttttaaaatataattaaaataaacatctgagtgaaaaaaactgattatgaaattctgagtttaaaataggaataaaataatttggtaaatataatccagaagtgattatatttaaatatatttatctaaatattcttatataagttttatataacatgaacattaactggtaaatttggaatgcagttgtatattttttgttaaaatatgtcatgactaaatataattgcaaaaaaaataccatttctatttctgttcaccggccaagttaatacttgtaattctgaactgttagcctcatgttaaagttagccatagcttgcagtaaattgaacacacagtagagacttctaagatataaactaaaacttatctttatgaaaaaatcatttgttgagtgtaaactccattaaaaggtagaggacttgttcatgaggtagggatgttgttttattcactattttgtatgaggcatttggaacaatacctggcatataataggcactcagtaagtatttgaatgcatggatggataacaattgaatagtctgtgtaaacaattgaatagtctagagtaaagccaagctacagtgtatctttctacaccaatactcagatttttaccattaatattgcgccctctttttttccccaataataagtcttcagtgcatgaaaagcacttcctccctctgaaattacatcggtaaaataggtcatctcattctggaggggagaggattaaaatctagatcagatgctacttggttggtttattagaagaatttttttcagtctactgaatttatggcaaagaaacaaaactgaattttctgtcattttaacacatttaacaacttgtaattcaaagtttaggttctccacattttacaacaggaggctgcaactatagaacaccttattccaatcagatttaactctgtgataaaaataagttagtggcacctgttagagcagataagccacatgacatttctgatcttgagttgtgttactaagtgacttccaggccaaacttcattagaaatattctttattggcctttggtgctagtgggtctctactcttttttcagtgtgttgacttcctgccccaaattctggagcttttaactttgtactttattttccagaaagtggaagacttcactttacttcacttctttatttttaaacattttaattctcctggctgctgacttgagcagaaaaccaggagagataacagccttgcgctgactggtaacactttgtatgtctcccatccgagttctctagttgaccttagagagaattagtgccttagagagaagaatggcaaagatacagtcagtgagggtaaaggacagaagctgtgtcgttattccaaagctggaccttggtcattaatgtttcagaaacatgaaggaaaaccaagcaataagcacaaagttaggattagggtgtgtgtgtgtgctgaagagactaaggagaaaggatgggagtaaggaaagggacagtaatgtcagaagaggacagaggtgcttatagttaagtacaactttatcaacctaatatattaagagattatctagcagttgtatgggatttctgttcccatgtacagtcttccctaatgcataacattccagcttaactttgcatctgtttactgctgtagctaaataatgagtttgccagaggctaccagtttacctgtcttgagaatgttcatactgtgttaacagcttgcacaggaatagattggtatccacatttccttttgttacttttttgcttttttgcaagcagccttgcctatatgtaacccattccctttttcctgttttaatcttatctttttttaacaatgtgaatatttgctttctatagcagtaactacattgaatagtcttctcagaagctggcagatttgaacccaagtttatttacatatttaagatagaagaaacatgaaaaagagcagtagaatgtgtgtagtgctcattaaggcggtataaaacattcatttcaattgccaaaccagcagataaaccatccttttatgtttttctccatattctgcaacacgcgttagagtgttatgtatttggagacaagggagtgtattttttcatctttgtatatccagttcctcatatggttctttgttaactgtcaaatgaaatattgtatatatttatggtagtatacaacatgatgttttaatatatgtagatattatggaaggattgaatcaagctaattaacatacccatcacttcacatacttaaccaatttttgtgataagaaaatttaaaatctgccctcttagcagttttcaagtatagttggccccccacatttgcagattctgcatcagcagattcagttaaccacggataaaaaatactcaagaaaaacccagcaacaataaaaaatcacaatacagcatatttaaaaaacacaaatttttaaaagacactataataatttacgtaagatttacattgtattcagtattgtaagtaatacagagatgattttaaagtatacagaaggatgtgtgtaggctatatgtaaatactatcattttatgtaaggcacttagcatctgcagatcttgatatccaatggggatcctagaactccccatgaataccaagggacaayggtatacaatacattattatgtactgtagtcaccatgctgtataatagatctttagatctgttccttctgtctaactaaaactttgcaccatttaacccactcccttcccccacaaactccagcctctggtaaccgccattctgctctctgcttctgtgagttaaatgtttttagatatcccatataagtgagatcatgcagtatctgtcttttctgtgcctggtttatttcagttagcatggtgtctttcaggtacatagatgttatctcacctgacaggattgatttactgtcaggtaaaaacatattccgtggtgtatatataacctgttttaaaatttattcatcaatggatggacacttacattgattccatgtcttggctaccatgaataatgctgaaattaacttgagattgcagatatctcttccacatgctgatttaatttcccctggatatatacccagaaatagaactgctggattgtgtggtagttctatttttaatatattgagaaacctctttactattttccaaaatggctctactaatttgtattgccaccaatrgtgtacaagggtttcctttttctccaccttctcaccaatacttatctcttgtcttttttataatagtcattctaacaggaatgaggtggtgtatctcagtgtggttttaatttgtatttccctgatgattagggtcgttgagcaccttttcctagacctgttacctatttgtatgtcttcttttgagtaatatcttttcaggtcctttgcccattttttactcaggttgttttcttgctgttgagttgtttgagtttctggtatattttggataataactccttatcacatgtgtggtttgcagatattttctcctttgctgtagattgtctttgttgattatttcctttgctgtgcagaagcttgttaactttaatgcgatcctatttatctttttgcttttcttgcctgagttttttgggtsatatccaaaaagtctttaccaagatcattgtcaagtagtttgtagttttgggtcttatatttaagtctttaatccattttgagatgatttttgtatatgcggtgagataagggtccagttttattcttttgcatgtggataactagttttttcagcacagtttattgaagagactgttttttccccattgtgtgatcttcttatctttgttaaagattggttgactgtgtatgtgtgggtttatttctgggctctctcctgttccattggtctgtatgtctgtttttatttcagtagcgtactatttttattactgtagttttaaaatgtgttttagaatcagggagtktggtatctctagctttttgctcaagattgctttggttatccaaggtcttttgtggttccatatgagttttagaattgtttttcctatttttctttgtctgttttatgttgccgtaacagaatatttgaggctgggtaatttataaataaaaggagttayggccagatgcagtgactcatgcctataatctcagtgccttgggaggccaaggcaggaggatcactcgaggccaggagttcaagaccagcctgggcaacataataagactctgtctttaccaaaaaaaatttaaaagtagccaggtgtggtggtgcacacctgtagtcccagctactcgggagactgaggtgggaggatcacttgcgcccaggagttcagggttgcagtgagctgtaattacaccactgcactccaactagggcgacagcacaagaccctgtctcaaaaagaaaaaagaggattatttaactcctttttctgtaggcagggaagttcaaggagatggcccttctggtgagggcttccttgttgcatgataacatggcggaggtcataggggtagcagacaggtacaaagagagagcaacaaaaaggaggaggaaacttataacagcctgccctcataggagccaattcatcttgcacaagagagaatttactcactaccaagagaatggcaccaagtcattcataaaggatccacccccatgactcagaacacctgccactaggccccacttcccaaaacctccacgctgggtatcaaatttcagcatgagtattgctgaggacaaactcaaatcatagcactatttctgtgaaaaatgtcatcagaattttaatagggattgcattgagtctatagattatgttatwtaatatttatgtaacaatattagttcagttcatgaacatatgtctttccatttgtgttctctttaatttttttattaatgtttcatagttttcagtgtacaggtctctcaccttgattaaatttactcctaagcatttttttatgacattataaaatattttttcttgacgtcctttttggataattgattgttaggtatagaaatgctactgatttttgtgtttctattgtatcctgaaacttcactaaattcattgcttttaacagatttttggtggaatctttaggattttgtatatrtaagatcatgtcatctgcaaacagtttaacttcctcctttgcaatttgaatgccttttatttcttttycttgcctaattgctctagctaagacttccaatactatgttgaataacagtggcaagagtgggcatttgtgttttgctgatcttaaaggaaaagctttgagcttttcaccattgartatgatgctatctggtaggcttgtcatttatggcctttactgtgttgaggtacattccttctatacctaagttgttgagagtttattgaagtatgttgaattttatcagatattttttctgcatatattgagatgatcatttttttcctttattctgtggtgtatcacatttattggtttgcatacgttaaaccatccttgcatgccagaggtaaatccctgttgatcatggtgagtgatcccttttaatgtgttgtggaatttggcttcctagtattttgttgaggatttttgcatgttttcatcagagacactggcctgtaattgttttcttatagtgttcttgtctgattttgatatcagagtacttctggtcttgtaaaatgaattaagaatattttctcttcagttttttataaaagttcaagaaagattggtattagttcttctttaaatgattgtttaactttaccagtgaaaccactagttcctatgcttttctttgaggggagactttttattactgactcaatcttgttactacatactggtcttttcagattttctgtttctttgtgattcagtcttggtagattgtatgtttctgggaatttatccatttcttctagattttctgatttcttggcgtatagttgttcataagtctcatgattctctgtatttctgtggtatcagttttaakgtctctwctttcatttataattttttaaattttactcttattttttcttagtctacctaaagggttgtccattgtgtttatgttttcaaataaccaactaagaatttcattagtcttttctgtaattttttttctgatctctattttatttatttctgctctgatttttattatatctttccttctgctgactttcggcttactttgctcttctttttccagttccttgtggtgcaacattagttgtttatttagaacatttctctttttttatgtagttgtttatttctataagcttcattattagaactgcttttgctgaattcccataccttttgttatgttgtatttccattttcatttgtctcaagatatttttaatttttccttttaattgcttcattgacccaatgaatgttcaagagcatgttatttaatttctatatttttgttaattccaaaattcctcctattatgggtttctagtttcattccattgtcagagaagatacttgatgtaatttcagtcttgatttcggacttgttttgtatcctaacatattctgctaggaaagtrggaagtaactagattgggacaaaatggttcagaactgtagtggttggaagggatcattgagcactaccactgaactggccagtctttgataaaagcaaatgctctgttcttttcctacgtagagttagcactacggtactagaaatgttgattataaaaaatttattctacattttttttgaacttttagtaagaaacrtattaatcagtggaaggattcatagttttcctggtatttcacttgaaatagttttaaaagtaagaccttgcaaggaacatggatgtttttgtctaaattctgaaatgatcacctttacactaatttcctattttctcttcgctcttgtttgagataattattagactgaaataggttctttgtagtacatttctaatcttgcaagtacacttgaaagtctacatacccagagaaaataagtgtagaatcatgattttagcatgaggattttaaaactttttccattattctatcttgctggcttaaaattagtacagctttctttcttgttttgtttatatttttacctttgaatgtttcttcatgtaaaagtgtgttgagaggattgagggagagggtttatgctgctgtggaaatatttttccttctttttggttaaatctgctcccccttgtggtataatctaggtcattatagtgctcatatttaatatctcagaaagataataagttcttgagtgtttactccttaccagatgttaggctaaatgcttcgtatacattttctcattcaatcatcacagccacctttggaaagagatataattatcattcagccctattggatagatgaggaaacacaggattagaaactataactagtgagttgtagaactatgagttgaacttaaatttgtctcattcaaaatcccataaccttaatttctctgtcataccatctccaagagcactccagaaggaaaactttctcattgagggctacagaaatacttgcactattttcctcattttcttatttctccattttaaaaatcattttttcactttcatcctcatctgatagaaatggttatggaagatgcaaaaaaaaaaaaacacacagttttaagtgtctagctttgtatgaatctgcctcattctaagtgagcatcatttgtacctctgtcattgtttttggtaatacccttgcaagaaaacattctccattggttggatccttcactgtttgcttacattgggagttttgattcattgtattcttaacatttctaatgacataatatctgaagaaagggagaataaatgaagagtgttttaaaatatcatttctgctaatctaatgtaacaaaattttgtaactataaaacctgactacttaactaaaagatcytatgttcagggtcatagcacttaatgactttctggcatgcttttacattcaaatgtctgggtgtaaatttaatgacttctacatttcgaggctaaagaaaatttccagcaaacacaaaatgaaaaagagtaaacacatatgcacctgataatttgttttgatgcatttatagttttgataataaaaagtactttrtattgcttttctattctgttcttaactagattttttagtagtaatgtgtattttgtgtgtgtgttcaaagggcagccattctacaaaagtggaagctgtggtcagaactctgatgaaaatacagcttagagatccaggggccaaagcactcgttttctcaacggtataatcaacattttcatcctcaatattaattcgaactgattttccctctctaatcagtttacagctgagaactaatttttgatgtttactcttagattttttttcccaaatccataagatagaattatttttagagaagatagaattatttttagagaaatgtgatgatgtttcacaaggcaatttgtatagctatatttcatgactttttattagtttcatttaaggattttcttagtttaatatttttaaaattggaatttctgactttgaaagtctcatttcacaaaaatttgggttgaaaaagacaatctactttataaagtgttgagtaaaacccttagttttcattttcgaaaactaagtaactatattccagtatgcactccattatgtattttctactgtttgtttatcttaattacattttcaaaaccagcatttgatgcaaaaaaaaaaaaaacaaacaaaattactatttcagatagagctaaataatatggatggtactacatttgagggttttggttttggttttattttcttaactccagtataaaagtcattttgatttatttccttttcagatacccttagataaaggctacgtgtaaatattggttttcttattgttttatgtgttctagtggcaagatgtattagatattatttcaaaagctcttactgacaacaacatggaatttgcacaaatcagtcgtgttaagacatttcaggtatgttaagattttactccggtttttgtagtggatacagttgcaaatttaaactgctgttaactagcttacttacatttattgtctcatgccatataagccacataaacagggtctgagttcttgattaattataaagtgaacatttaaaagcagagactgcaggtattttcagtatataacaagaccattggttttttaaagatctcccaacttgaggttcttttttttttttagtacaggaaaagattgcctatgatataccttttgaatggacaggggcctcacaccccaaggattagtttctaaagtcactgtcaggcagaactgcatgtggtcacagttatccttacatcatgctcagcacagtgacaggcgtatgacctcaggcacacacagagaccaaatgaaaatttagcagattcatgtctcttatctcacattcactctagcacattctttttctctttttcctctaacctcatgtagtttaatttgcatgcattacatgcatctgtcttgtgattcctctagatattacgaagaacaagagagcttatatgatacttttcttcataattaaaakcaagcgacaagtttacattttctaaagttggtaattttgcatttaagtttcttagctgttacctttcacaatagtaatagatagcattagacatctttaaagtgagctattacatactgctcttattttaactgatygagctaaaattaaaatgtacctttcttttttaggagaacctttcagcatttaaacgtgatccccaaatcaatattttgctgctgcccctgcacacaggttctaatggattaactatcattgaagcaactcatgttctcttggtggagcccatattgaaccctgcccatgagcttcaggccatagggagggtgcaccgaattggacagacaaagtaaggactaaaattagaatcagtcacatttgcttcagttttctgagaaaccaaatcagtatttaaactcttcatttatgttcatcatagcgtacttgtttttaattacttccttagatactacattttttaattatttattttataacttatttatttataactttttaattatttaattgaaaggcatgagatttccaaccctcccttctctccaagaagcaaacccccaaattgtcccaatttttttcttccctcccacaaaaaccttatcactttatccaaaaaaaagcttgttagaaatacttaagacagctacaaagttgaaggcatccatcatgcctttgaggagaatggagttttgattgtctaaagtagtcccgtgtttaaaagaagacataccttgtacatgactgaaaataaatggctccttttaaaattcttaacattaggaaaagacaccccctaggtcagctccaagagatcattagattcagtttaaggcccaaagcaaacctaataatgaatattattatatggcatgtattacctttattcatatatcagaatagacagttatctttgataaggcctgctaaatgtattaccttctggatgttagaagtctttgatgtttaaaaaagraaaaaaaaacacatccataataagcacttactaaatcagtatttattgagcacctactgtatgtcaggcattattctaaatactgaagattcaaattgaatgatacataatttatttccccaaggaggtcactgtgtagtacaggaagcatgacttaaagtgttggggtagaatgtgcaaaagtataataataaaaggactgtgttaacaaaagaagataatgatcactcgggccctacagagtcaggaaagactttatggtgttaagtcttgaaggaataattatttcaaagttggctggaaaagggtattcacacagccaaagagagttatatatgcaaaaatacaatggtgggaaatgacatgacatttctagggactgtaaggagtttggaattgttgcagtataaagtatgagaaagagatcatcggcaggagatgaagtcttctgtgtcatactcagaaatgtagactgccccgtaagaagtagcggggagagaaaataaagggcttacttgaaaacaggaaagagacatgtttattaaacctcttaacaaatagggcaaagtaactgtaataaatgcgggcttgttctaacataccaccaagtggcatttaaaatgcagtcatgtcttacttgttttttgttggttttcttctgtgtttttaaatattgattttttgtcctaccaatgttcttttaaagcataggctggactagtctcatatttaaaaccacgagtccaaaaggccattcagcattacccaacaatcttactatgcctcgcaagtcaatatgtttttttctactttctgaggagtctgtcttaagtgtgtcttcttcctccccatggcgatcttgcctcatacaggggaaacatatacaatcagattagaagtacctcatctttccatcatcaacttgaacagtctgcctgcatcagtactcacatactttttggtagatttttattgagtatcttctgtgtgccaggcactgttttaggaacatgagatgtcctcatggagtgcgattctagctgtaatggggttggtagacagaaaggtggtaaacaataaactaagtacaatctggactatgttaggagctggaaaagtagagcagggtgaggaagtaaaagtgcaatgtttgggcaggaaggcatgcaaggccttattgagaaagtctgagcaaggacttgaaagaaatgggaaaatgggaaagttagtcatgcagctatcttgtgaaagaatgttcaagtaaacagtgctttcggtgcaaaggccctaaatcaggagtgtggtatgttagaagaatagcaaggagctacagttgctaaaagggagagaagcaggagttgaagtgartgggctcagtggggagagggattacattgggcccaggaagccactgtgaggayggtgcttttgccctgtgtgaaatcgggagccattggaaggctttgaacagaggcttggcatatctcacttaagttttaaaagaatcattctgagtgctgtgatagggtgggagtgaaggggagcaaggaagagtagaagcagggagagtcttggaggctattgcagtcatcctggtgagagctgaaggtgacctgaccatggcagtagcagtgcacatgatgaggagtggtcaggttctggatatattttgaagatagaactgatagtacttttggacagactagacatggggtatgagagggtcaaggataacaccatgggttttggcttggacaactagaaggatgaagtaaccttcaactgagctggagaagtctacagggtagagcagatttggtaagggaagaacagacatccaaatggagatttctattctgtaactagatgtacaagtccattaagtcacgagactgaatgagattacctaggagtgagtttagatagagacagagtttagatagaggaccatggactgaactccagggcaccaaagttcagctgttctaggagaggagaaggaagcagcaaaggtaacaaataaagatcaaacagtgagttaggaagaaaaccagaagacaggagtgtcctaggaaccaagtgaaaaatgtacctcaaagaagaggttatggtcacctgtttcaagtgctatgaaaaatgtcaaggaagataaggattgagaattgatcattagatttagcaacatggagatcaaaaccaggttaagtggtagaggtgacagcctgactttagttttggagaaaatgggattttgtgtatttcttatttaacaaatatttgtataacaaagagaggttaggtaacttgcccatagtcaggcarctagtagaagcagtggcagatttcaggcacagccattctgccttcacagtacaagctttaaccacagtgcactgctgcttctgtgtggctggtaaggccagtattttgaggagttttgctgcagagaaaaggaagagaatgagatcaagagaggtttttgttttcctttcaaatgggagaattagtaagaaaatgattcattagagacaacaaaaactagtgaaggagaacagggagaatgcttgacaatgtccttgagtaggcaagaggatatgggatcaaacactgaagtggaggaaggggttggtagtaggcagaagcatggatatgtcatccagtaataagcaggaaagtacctcatatgccttcccttttattacagcagaagtgtcccttttctttcaaaagccatccattcatttgtcctggactccattctttctcatttttcaaggacaggtgtacatttcccttgtacaggttgagcatcccttaactgaaatgcttcaagtgttttgcctgtaggattttttcagattttagaatatttgcatatacatagtgagatatcttaggaatgaaaccccagtctaaacatgaaatttatttatgtttcatatacaaattctactcatagcctgaaggtgattttatataatattttaaataattttgtgcacaaaacaacgtttttaatgtgttttgactgtgactcatcacgtgaagtcaggtgttgaatcctccacttgtcacgttggcactcaaaaagttttggattttgggtttttggttagggatactcaacctgtcatatattaccccataaatatgtcttaatattatccatctttagaaagaaaaaaacactctgatacatcctacctccatctctacttttttatcccccattctctgtcaacctgtctggttgattttctccccaccatatcactgaagtgagacttataacatttctagtgacctacttcttgccagtggtctgagggttctttgtctacaccccttcgatgaatttttccagtcttagggctttaggtagcttttacaggttgatgactctcaggtgtatatcccccagcccagacatgcccatatagctcctgtcccaggtgcatatatccagttctagctctgcacacatatctctggactcaccttggatacctgtctaataggtatctgataggtttcacatggacaaaacaaaactgtgttgcttctgcactctcactcccaccctgagctttccccatcttataatgtggcactgtcatctgttcctgcccagatcagaaatctcggactcttctatatttttcttttcacatctcacatgccagtcatcttttaagttttgtcagctctacctccaaaagatattccaaatctacttgactgctatctccactgacacaaccatagtgcatccacccttacttacccagatgactacaggacttcttaactggcttctctggtgctcttcttgctgagcaagaagtacatcctccacacggttgccaaagggatttctaaagtacagtcaggtatacatcaaatcatgcatacaaacccaccaagggcttcccattataaccacgataaaattcaaatgcttggtcacatcctggaaggccctgtgtgacctggcccctgcacatctctccacccttattttcacctctctccctcgcttacaggatgcttctgccatgccagccttcttttggcctcttgaacatgttaggcttgttccaggcatattcccttcccggggactgtgtatgtatgtgctgtttcttctgtttggatattcttcctactcctcctttgcctactggcctcattcccatcactcttttttcagtttgcatgtcagcctgttctcccagcattatatttacctgaaaccgtcttactcttttatgtgtttattgtckgtctctcattagaatgtcagctcatggagattaaatagttcattttattcgctgctgaacccctcccagcacctgccacaagtgggcaccaactgactgatgaatatagcatataaaatgtgaagtcggtttgtactgatttgttttactatgtttttaagcttaaaattcttctgtaccttttagacctactattgtacacagattcttaattaaagcaacaayagaagaaagaatgcaggcaatgctgaaaactgctgagagaaggtaggtaataatttaccacaagtagaagggggaaggttttcctgttaaaagtttgtatctttasaacttcttcacttagatgacaacgaaaaatatagcacaaatacgtttttaaaagcaaagtctgacgttttgccttttcactgtttcccagtcagtgctccagactttgtatatttgaattaatttattaattgtaacatgtaaatataaactatmctacattcctttgccacattggatcactttctgaggctgggagttcgaaaccagcctggccaacatggtgaaaccccatctctactaaaaacacaaaaattagccaggcatggtgacacgcaccatagtcttagctagtcgggaggctgaagcaggagaatcgcttgaaccccggaggtggaggttgcagtgagccaagatcgtgccactgcactccagcctgggcaacagaacgagtctgtgtctcaaaaaaaaaaaaaaaaaaaamaaacttgttaaggttaattgtggtgtcaatccaaagacaaaacaaaagcagagagactaaaccagtcttaattttaaaagcttgactctggaatcatagaactttctaatatttatggtataatttatttaaatctttttgaaaacataaatctttctacatctttaggaggtaggtaggattggatggtacccaaggaagagattattgccttagaagggattgtcacatagcaaagaagcaatttgaaactagaaattttcttccattgatggtttctgggaaggaaagaggcttccacaagggcctttttacctaaaacatgaaggctttttaaagttcttgttttccttgtgtatcagacttcagtgatttttatttaggttgttttaataaaatagcagttatgagttgtttgaaattctcttgaaacaaattaacttcaggtggtaagaaggtaatttgtaaggtgagagccttagtagcagtagtcaagagttttattctttgttctattaattgcacagagaaaaaacactttgacaaacmctaaaagtaatatatagaaatcttcactttgacaaggtataacaaagattttatcacttgctttcctctgggagtttcttatatcccaattacaaaaacttaagaaaaaatatgtgtctagttcgtattactacaaatataatcgctgatggcttggggtttctttctgactgtgctcatttgggaaaccttgcagtcacacgaactcatcagcaaagcattcagaggcctctgtcttgactgtggctgacctggcagacctatttaccaaagaaactgaagagcttgaatgaactacacttgattcattccatggactttagtgtattaataaactttcatagctgtagagcaaagttacaagttttaaaaacccagtagataacagtaacactgttcctagttgaatgaatttgtttattgttctggttatacagtggcttagtacttattgagtcctttkcaatatactgtttccaaaagatctataaagattcttaattttacactcctaataaaacatttattttttgtcccaaatagtatctatatctgaygatgcaagggaattaagagaggtaatgtgtacttttcttatgataagatcactcataaaaacagttggaataagaaagtaaactagtctagttttataygacctggtatattgaacaaacatagatctcagttttggaagggccttcagtatctttagcacatgattcaccaatatcttgttagtaatattttaagtagatggtgaattatattaacccattttttgagtaggcttataccataactttacacctagtaattttgcagtaatacaactccttacaataagttaatgttagacagttatttgtttcttctgcatcttgctactgaaaacaaaaacaatgaaaatattcatatttctattatgtgtaaagtggtgttagtgtaaacagttaactccaaatagattttttaatgtattaatgattaccttaaaattatctgctttccctactcttaatttttcttattgttaaagtttttatatgttgtaagattgatgtatctgtaaatattgcagtttttatgattttgttttattataacatggaaatatggcagggttttttttttaatcattattatactgatgtcttggattctttttctttcccatgttcttgtgtaactagactttttagccagtgatatctgaattcatggtagagttgttatttcactccagttgttcctcccttaagcacgagtctttgaccttttgaacaagagaatgccatgttcacataagcaaatcgttgcaagtgataataacgaagtgtttcttcttctgtgaggaattaatggactttgaaattgctgaataaggagtagcttgttacatcctagccatttgatgtaatacaaatgttcttatttggcttccttttctttgagccttcagagttttaaaggaccctctttgaccctcaggacttattagctcccagttagctgcctggaaaactcatagaaccattccctagatcccatttgtccgagaggctttggtgcttagttaaggtgcattttcttactctaggtttatagagtgatgtaattcaactgaagaaaacacacacatgcttttggtgcttattcttcagttaaaaggaggtatccattgattcttttatatgaaattaaatcaaactgttatttttatagctcttcacatattaaaaagagctttcatgtacatttacgtgtttaatttacccaacaatcttgtgaagttgatataattaatatctttactgttttaaaggtagagaactgaagttcagatatattgaaactttcttaggacatgtagcaagtaaacagtggagcccaggtcccctgactccatatcttacattcttttactaataacatgtcatgctgagattcagaaggcccatgcttataatttaaaaatgagactatttcagtatttctttgtgtttgttttctactattcctttctgagctatgttttagagaaaacaatttgatatgcttcaattttgtaaaatcaaattacatatatataaaaaaacctatctgtattagacaaaaaytgtttttatttatttctgtaagatatcmattaaataaatattttagtggaaatgaaaattgtggaattctttgatttctgagacttagaacatatggggttttttggttttttctttcaacaaaagatatcaaaatggctaatactatagaatcccatattttatatacatttattacatcttaaaaacaattgtgacagtttccaattgttcaaaacaartacaaatctgatcctcacattttcttggctgcaaacaaaggattttttaagttttctttctctattattttatagcctctgaaatattactgtgtttagaagtagttgttcttaaatgggtgctatgctaatgaaccaatgagacaaaatgagatagccgcaattgttagagtagycccagtcattaaacttaaatgtgtttggacctggagaatcattttctgtaacatgattccagatgagttcactagaactaaaaagatacatacaatgtaaagtgcatatacctaacgtcatagcctttttgcttcaaacccagatagctctgctatgtttattgcagcgtcacatttctctttgtatgtgacctgagctgaataagccatgcatgcattcagttttaggaattgttatctttcatatcacatgaacaacaaactaaaaatcttaacatgataattcaacatgcaactacyaatactttacaaataatgatcaaaccaactacttacctaaatatttaggaaatgaatttaacaatgcaagrttaatcaccaatgcaagctatcctgtcaggtggataaagtaagaaatcatgtctttttaatctcctgctctcatttaatagctcttccaatgtgcttaagttatttacgtttattaaacgacgagacaacctttcaaaaatgcagagatcaccgtgctgaataacctcaggcttaagtcgaataaaaggtatctttcaatttttctagaatttagctaaacaaaatcccacaatgtgccatttcataatttttaactggcatacaaatgcaaaaatggaatgtaaaaaaaaaaatgagtgtaaaccaattaaatgaattaaaaaccaatgcaaaaacaaaaaaatgcattacaacagtctagtacaagcaatgcattttaagcctgtctactctgataaatgacatctagtcagtaagacttcttcaaagtgagatcagttaacagttttataaaattttctgtttacaagaatctctgtgtacctctgttacattgtgaagcccacatgaatgcttatcacatggaagggtcgaatatgaaccacttgcaagccttcccttagaggaaggctatgtaagtaattgataaccccaaagggagttcaagccttatgctaggtatgtggtgttgcctctgagttacaaaacagatagtatcacatacagaaaatagcacgagtacttggcagaggccaaagttgccatctccagccttcccctgtcttcagacagccttttcaggggcatgtatagctcatcttygaagagtaaaggtccccacaccatcctcgtatcttcatcatttaatgtcagtgactctcaatactgatttttggggactgactttgttatcttgaaaccaaatttttattgcagcttatgcttcttttcctgcaaaatagaaattaaaaaacagcctccattatctgtataatgatctttrtataggtcactactattactaaaattaataactttttccctgcttatcaaaaaatcagccttttttaaatggtctgcctttccaaaccctattgttatctttgtctctccagtaaacctgctcttaatgctccacacccccgtagatagcctattagaggagccatttgtccaaggacacattttcgacctatgggatcttcccagacctgtgatttgtataygcacacagttctgattactgacccttccagtgttctaatgagcaaacatttgtgctcaaatttccttagaaatcgtttctgcatattttattatttatttaggatatacttactgaaattacctgtggtcattttctgccaagactatttaattaacatttactgcatcatgtccctaattctttacccagaaccgtaaggcacctcatgcctcttctgatctcttggcttcccataatcaaacaactgctatctccagttatttttccagagcctttgtaaaaatttccattgactgagagcatcattgcctgttgataatgttgagtgtattttcctttrtcacagaattatgtcttctttggtaaatgcaaatctgtgttttaaacaggaatgcattttagtttctgatctttatcagaatgtttataagtgaatccgctattaaactgtgaaagcatcagtgtggaatgttgtatttacctaaaacttccccagtgcttttcacttctcaagtccgtaattataatcatgttaatgtttatattctgcaactgaccattttctaccctgcactcagatttgccttcccagattttctgccagcatgatagggtgcaaataaatactttacacctctgtaagaggcacttctgtctttttcataagttgttaatgatgactcaagcagtcatctcgtttatgcagtgatttatttttaagggattactatttacgcatacaggagaagatttagcaagtttccttcttaaaatggctttggcctttcaagcaagataaagatctctactgagtaaaccaccttttttttttttttgagacacagtctctgttacccagggtgaagtgtagtggtgccatgaccgctcactgcagcctcaacttctcaggctgaggtgatctcctcacctcaacctcccaggtagctggtactacagacatgcaccaccacacctggttaattttttgtagagacagcgtttcgctatgttgcccaggctggtctcgaactcctgggttcaagcgatccacctgcctcggcctcccaacgtgctgggattacagtaaaccaccttttaattctctctttttttcccttcctttcttccattattccttacttcctttttttcaatcttatttcctccttggttttgaaactgtatgtgtaggtattggaaaaagcagtttatccaccatcattacataaaaaggacgcttatcagaccaagcattcctaactggagtcagtggacttacgaaaggaaaaaaggtccacaggtgagcttcaaagggcaaactcccaagatgtgtaccttccagcagcttcctagagacagagtttcatattgtcagattcttaaagggattcaaggcctaaaaggacccattgccatagaccatcagtttccaagtgtggtccttagggatctccaagaccaaggagtctgaagggccctaggattttcttcatatgtgtcaacaaaaacaacatgctcaacacaagtctcttgcctgccaccatgtaagacatgcctttgctcctccttcaccttcaaccctaattgtgaggcctccccagccatgaggaactgtaagttaattcaacctctttttcattataaattacccagtcttggggatttcttcataagagtatgaaaatggactaatacaaacaacaacaaagaatttaaataatgaaatatattccatagcctgtttttatttaaaaactaaaaatctatgttttaataacagcaaaaagattctgtcccattagtaagtaaaaacacaatcttttacattgttttactccaactataatttatgcgtgctttaaaatagaaatagctaataacctatttacattttaaataaatgtgcactggatatatagttgcacaaaccttttactggtgagatatgtaattaaataagtttggagatcactggaagagaagtaattgttgctcttacgaatgtgagaagcttttattctagttaagtttttatcactcgaaactcttttaggatgcttgaaattgctttcaaagccaattaagaaattatacaatttcttcataacctcacatcattttgttttattaaccaaaaaagtatattttctattttatatacattaacttattatattttgtaatgtatatattttatatagtttctaatttatactcattacgtgccaggcttgctttgcatgtgtacccttcctgaaaagtttttttctttccttttcaactttttttttttttctttgagacaagatctcactgtgttrcccacgttggagtgcattggcatgatcatgactcactgcagcctcaacctcccagggtctggtgatcttcccacctcaatctcccaggtatctggaactgcaggcacatgccaccacactaggatgatttttgtagtttttgtagagacagggtttctccatgttgcccaagctggtctcaaactcctgggctcaagtgatcctcctgcctcagcctcccaaagtgctaagattacaggcatgagccactgcactcagcctgtatttttaatcttaaaattggcagttatgggtcaagaattttgcagaggaaatgtagacctatgttaatattaaataatgaatttattccatgtttcaattttttcagtcaaaaagtagataaagcacctaatttaggcttaataataatttattatctcatgaagtttctagaatgtttggagatacacctggtaacatgagggaaaaagtcaacagtaaatgttctgttttcagaaacctaaacattgagaaaattaatattgtcaacaaatgttagtacttagtcttgtgtcttgcaatattttcatgtttgttttctccctcattgggtagagaaggcgtgaagaatttcatcattatatcaagatggtggggggaagctagtcaccatttctttttttcttttttcctttttttttttttttttttttgagatggagtttcactcgttacycaggctggagtgcaatggtgcgatcttggctcaccacaacctcctactcccgggttccagcaattctcctgcctcagcctcccgagtagctggcattacaaggcacccaccaccatgcccagataatgtttgtatttttagtaaacacggggtttcaccatgttggccaggctggtctcgaactcctgacctcaggagatccacctgccttggcctcccaaagtgctgggattacaggcatgagccaccrcacccggctgctagtcaccttttctactgaatacagaagaggcgcctataggatcggttttgattatccatgagaaaagagagttttagaatgcagaataaactatcaaaggagatagtgaaatcctttctgaaaaattttaagaaaaggaaagaatttttttaagtgcagataaacttcaagagtttaagtcctatatttaaataactatggtattttctgttttaggtttgtttttctttctcccaaaatatatggtgttaagttccagaatatcttcagccaactaagaaatacaaggaggaatggggggtgttattttctttttttttaaagttagtaaacagagaaaaagcaactatttcttttttaaaatgtatcaaagaatttaatgacttcagtacaagaggcagtgggtgttcagtaaatagtaatttaactggttagaataaataaaaatatgataactatggctcacaacagagcagagtcatgtagttactaaaacatttgcacaaatactgtccaccaaagggacccagctcataagcactgagaaatgactaatatttctcatgtaactgtattattcccatctgtttcatatttaaatttagaggaagttttaatagtaccaaattcatataaatcttttgaagtccatgaacagtaagaagtgctatttgattcttattccttgattttgatatcagtaattgttatacacactgattagcttttatctccaaattttatttaatactgcctaatgctggttgtttcttttggagtcctataaatctggctgccaagaaaaatgatggctctgctccgaaaccacaaagtggctgyattaacatttagtgaatctcaagtagaaaggaacagtgaawttcctgaggaagccattctccagaataataaagtattagcgtttttctcatagtagacaaaagtcatgggttttcctccttggcagggagcaaactcaaccttaaaaagtgatagtcaacaacagaaagacaaataacccaatttaaaactgggcaaaggatttgaatagacatttctccaaagaagataatatrtaagtgaccaataagcacatgaaaagatgatcaacagctttagcagctgggaaagtagatatcaaaaccgaaatatgaaggtttggagaggaggaaggaatgaataaacaaaacgggatttttaggacagtgagccttctgtatgctactacacgggtggatatatgtcattacacatttgctggacccatagaatgtacaacaccaaaaatggaccctaatataaactgtggactttggrtaatgatgtgtcataatttgaaacaaatgtacaactgtgatgtgggatattgatagtaggaaaggttgtgcatggggttggggggaggcaggggtatatgagaactctgtgtactttctgctcaattttgctgtgaacctaaaactttygtagaaaatagtctattagaaaacaatgagctatcactttacaccacatgacttgtagatgaaaagagtcaaactctgtaaaatatttgaagagatttattctgagtcaaatatgaacaaccttggcccgtgacacagccctcaggtggtcctgagaacatgtgcccaaggtggtcggggtgcagcttggttttatatattttagagaggcataaaacatcaatcaaatacatttaagaaatacattggtttggttcagaaaggtgagacaactcaaagtggggccttccaggctataggtaaatttaaacattttcgggtggacagttggttgaatttgtctaaagacttgggatcaatagaaaggaatgttcaggttaagataaaggattgtggagaaccagttttattgttcagaagaatctctcagatggcagacttcagagagagggtaggttgtaaaatgtttcttatcaaatctaaaaggatgcctagctcttagttgattatccactggatctgcaaagaaaggaaagaaaataaaaggggaaggagattttctatggaatgtggatttttcccacaagagactttgcagggcaatttcgaggcatggcaaggaaatatattatggggctaaatattatttccttgtctcataatgtcacgccagagtcagattgaaaagcaagtcacaatatacatggtcaaataaaagccatctgatgaggatccatggtttgtaggacatgactccccagacctcttaggtaggaatttgggcaagataaaaatcagagcttagtccctgaactatagtcaaaagatagacaataacaagttttgttaaggatacagaaaattggaaccctcaaacattgctggtaggaatgtaaaatggtacagctgctttggaaaaccatttatccgtgtcttaaatagttaaatgtacacctagcagctatgccactcctatgtacttaagagaaaataaaacatatattcatacaaaaactcatatgaacagtctggcaggtacctggagtgttaaatggagttaccacatgacccaacatttctactcctaggtatttacctgtaatagtctgctagagctgccataacaaaataccacagactgagtaaattaaacaacagaaatttatttattacagttttggagcctggcagttgaagattacagtgctggcaggtctgttttcttctaagatctctctcctttcttgcagatggttgttttctgtatcctcacatggtgtttccctgtgcggacaggcccctgatggctttttataaggacactattcatacgggattagagcccccatcctagcagctttactttagcataaccacctctatacacaccttatctttaaatacagttacatcctgagatactaggggttgggacttcaaattatgaatttggtggagccacagttcagcctataataataatggagagaaatgaaaacatgtgttcacagaaaaacttgtatgtgaatatttatagcagcattatttatagtaggcaaatgtggaaacaacccaaatgcctatcaaacgataaatggataaatcaaatatggttatacttctaatggaatatgatttggacaaaaaagaaatgaaatacttatacatgctacaacatggatgaaccttaaaaacattatgctaagtgaaaaaaagcagtcccaaaatactgtatatttctgtttataagaaatgtctagaataggcaaatctttattttttttagaggatgggttctcactctgtcacccagatgggagtgcagtagcagtatcataattcactgcagcctgaaactcctgggcttaaatgatcctcctgccttggcctcctcaadtagctgggactacaggtgtacaccgccactcctcataagaacaggcaaatctttagagacagaaattacattagtggttgcccaggactaggagaggaactggagtgactgctaatgggcatggggtttctttatggagtaatgaaagtgttctaaatttagactgtagtgatagttgcacaactttgtgaatctactaaaaaccactgacttgtacactttaaatggctgaatttcatggtgtgtgaattgtatctcgaagatatttttgaaacatttttaaagtagcacaaaagcttattttaaaaaatatcatttggcatgcaaaacttcggcagagccaattgtagatgaaaatgagacagatggccttcaaaatatgaagcacacattgtaaagaatgttgtactccaggcctgtgaatctcactgatatctggcagccacagttaaaatgttgtagcatctggaattgcgggytgtaattgaaactcaactgaagagctttctgtggagctggaatgaccagccaatgcataaagttgttaaacatgaaacaaagataactattatcttttaaaaacctctcattaaccctcatgacgttcttgggtgaaggtctaatctggcacacttgctaacttctaataaagaatcaaatggtcttccaactcacataatgactaattctaaagcatgcaacctcaaagtactacattctccctgttctagaaatacaaccctagagggccagtcttccttcagcattcaaatattgagtagaacaactgaactgtaaggttcaactaaaggaatgcaactgtgacttgagctgtggaacggctatggcctaarkcaagaattctcaacctcagcactagtgattgacattttgggccaggcaattctttcttctggggcctgtcctatgcattataagattgagcagcatccctggcctctacccattagatgccagaaacatactccacccccaagctttgacaaccaaaaatgtttccagaaatttccaatatctcctggggcttaaatcaagaaccactggcataagccaaggaagaactaaccatttaccatggtacaggatgagtatcccatatcttgggaccagaagtgttttggatttcagattttttaatatttgcattatgtgcttactggttgagcatctgaaatccaaaatgcatttcccttgagmcttatatcagtgctcaaaaggtttcagttttgaagcatttcaaatttgggattttgggatttgggatgctaatctgcaataacatagaccatgtaccaaaagaaaaaaatcgatatgtttaatttgtacttcatttattcaagctctgtggagtttaaatattcagaatattatgcaaaaaccagtttccttgatcatactaagttttgatgaccataatcattgacaagtttattcaggagattttcatatgttgctctaaagtttaaacccaatgctgaaatgccagcttggagccacataaggaatgagctgtttgtattctattaaaagactgcccttgaaaatttacagatgaaaaaacttcaaggggataaaaatgtgattttaaaatcaattttgccacctagtaaaggatttgctaaatggataactatgaggtgatggatgtgttaattatcttgattttggtaatcatttcagaatgtatatgtatatcaaaacattacattatacaccttaaatatgtacaatttttgtatgtcaattataccttaataaagctcagaataaaaaaaaatgctgtcattaacagagagtttgcaaatacactcaaagtctttatcattaaggacayggacaccaggcagcatgatggaactcactttcattgttcttccagcctatcaactgaatcacataagaatgaaagatgaagtaaagttttgatacggtgtacttcaaggtttttaaatgtgaatttattgcattctgaaactatggtgtagatgacatctgcccacacattattattattattattattattattattttattatttttgagatggagtttcrctcttgttgcccagactggagtgcaatggcacgatctcggctcactgcaacctcctcttcctgaattcaagtgattctcctgcctcagcctcccaagtagctgggattacaggcttgctccaccatgcgccgctaattttgtatttttaatagagacggggtttccccatgttggccaggctggtcttgaactcctgacctcaggtgatccacctgcctcagactcccaaagtgctgggattacaggcgtgagccactgtgcccagcctgcccacacattttgatgtcataatactaacataatatcactttgtgatattaattttgtgacactgaaaagtcttcacctgtctcaagaggaccctaagtagacctcatgcctctggcttctagaggctgggactacatagtttctaacttttcgttctttttcttcatcctctccctccctccctccctccctccctcccttccttccttccttccttcytctagcaactgttactgagacactaaaactgacatcatcattgacacttagcaattacagtatgctgctgggaagcatgggcatgctggtttcttctcatagcaggaatgggaggcttaccaggaaccctcctcagaatttatgtccatgattttggctacagatgaccattaaagcagtataaggtcataaccagtaaagtcttctcctgtaactttcagaaaataaagtgaacttattaactggaagttgtgtcaattgatagtgtaagaataaacagactggctattttctataatcttggtaaatggcattcatccttttttcttgttcaaggcaaaaactctagagtcatcctagtacctttttcttctctcatccttcacatctaatccaccagccaatcaagcccaccctcaaaatgcatctagactctgaccacttttcatcatctccacagctaccacctagtccctgacataatcactctttttttttwatttccaacttttattttaagttcagggatacatgtgcaggatatgcaggtttgttacataggtaaatgtgtgccatggtggtttgctacacagatcatyctatcacccaggtattaagcccattatccaatagttattcttcctgatcctctccctactctccaacacaccctagtgtgtgttgttccccgccatgtgtccatgtattctcatcattttgctcccacttgtaagtgagaacatgcagtatttggttttctgttcctgtgtaagtttgctaaggatgatggcctccagctccatccatgtccctgcgaagcacatgacctgattcctttttatgcctgcatagtattccatgttgtatatgtacattttctttatccaatctatcactgataggcatttaggttgattctatgtctgctattgtgaatagtgctgcaataaacatatatgtgcatgtgtctttataagaaaatgatttatattcctttgagtatataaccagtaatgagattgctgggtagaatggtatttctgcctctttgtctttgaagaatcaccagactgttttccacaatggttgaactaatttacactcccaccaacagtattaaagtgttcctttttcttcacatcctcatcagcatctgtcattttttgactttttaataatcaccatcctgaatgatgtaagatggtatctcatttggttttgatttgcatttatctaataattagtgatgtgaaggcttttttcatgtttgttagccacatgtatgtcttcttttgagaagtgtctgttcatgtcctttgcccactttttaatggggttgcttttttttgtaaatttgtttaagttccttatagattctggatattagggctttgtcagatacatagattgcaacaattttcgcccgttctgtaggttgtctgtttactctgttaatagttccttttgctgtgcagaagctctttagtttaattagacccatttgctaatttttgcttttgttgcaattgcttttagtgttttcatcatgaaatctttgccaatgcctatatcctaaatggtattgcccaggttttcttctagcgtttttatagtttggggttttacatgtaagtctttaatccatcttgagttgatttttgtgtaaggcgtaaggaaggtgccagtttcaatatcctgcatatggctagctagttctcccagcaccatttattaaatagggaatcctttctccattgcttgtttttgtcaggtttgtcaaagatgagacagttgtaggtgtgcagtcttatttctgtattctctattcttttccattggtctatgtctctgtttttgtaccagtaccgtgctattttggttactgtagccctatcgtatagtttgaagtcagctagcctgatgcctccacctttgttctttttgctaaggattgctttcagtattcaggctcttttttggttccatataaatttcaaaatagttttttctaattatgtgaagaatgtcagtggtaatttaatgggaataacattgaatttataagttgctttgggcagtatgaccatttacataatattgattcttcctatccatgagcatggaacgtttttccatttgtttgcatcatctctgatttctttgagcagtgctttgtagttctccttgaagaggtccttcacttcccttgttagctgtattcctaggtattttgttctttttgtagcaattgtgaatcaaagctcattcatgatttggctcttggcttgcctgttgttggtgtatagcaatttttgcactttgattttttatcctgagactttgctgaagttgcttatcagcttaagaagcttttgggttgagacaatgggttttctagatataggattatgtcacctgcaaaaaaagatagtttgacttcctcttttcccatttaaatactcttcatttttttctcttgcccgattgccgtggccataacttccaatactatattgaataggggttgggagagagggcaaacttgtcttgtgctggttttcaaggggaatgctttcagcttttgcccattcagtaaggacactggctgtgagtttgtcataaatggctcttattattttgaggtatgttccttcaatacctagtttattgagagtttttaacatgaaggaatgaggatttttatcgaaggccttttctgcatctatttagataatcttgtggtttttgtacatcgaatgaagagcctaagaagaaaaatcacatgaacatatcagtaggtgcaaaaagaaagcattttacaaaatccaacacccattcttaataaacactcttagtaaattacaaataaagaggaacttcctcaacctgataaaggatatctacaaaaaccctacagctaacatcatatttaatggtgagaaacttgaaagtttccctctcagatcaggaacaaagcaaggatactccctcttaccagtccttttcaacattgttcttgaagtcctagctaatgctacacaacaaaaggaaataaaaggtatacagactgggaaaaaagaaatgaaactgtctttgttcacagatgacatgatcatgtatgtagaaaatctgaggccaggcgcagtggctcaagcctgtaatcccagcactttgggaggctgaggcgggtggatcacaaggtcaggagatcaagactatcctggctaacatggtgaaacctcatctctactaaaaatacaaaaaaattagctgggtgtggtggtgggtgcctgtagtcccagctactcaggaggctgaggcaggagaatggtgtgaacccgggaggcagagcttgcagtgagccaagattgcaccactgcactccagcctgggcgacagagtgagactccatctcaaaaaaaaaaaaaaaaaaatctgaaacgattgacaaaaaaacccttctggaactaataagagattatagaaaggttgtaagagaagactaatatatacaattctattgcttttctatataccagcaatgaacaagtagaatttaaaattaaaaatgtaataccatttactttagcaccccccaaaaatgaaatacttaggtataaatctagcaaaatacatacaatatctacatgagaaaaactacaaaacactgaagaaaaaaaatcaaagaataactaaataaatgaagagatagtccatgtttgtggatagcaaggctcaatattctcaagaccttagttcttcccaacctgatctataggctcagcgtaatccctagtaaaatcccaacacattattttgtgactatgaacaaactaattttaaagtttatatggagaggcaaaaaaaaaaaaaaagaaaagaaaaaccaaggtagccaaaacaatattgaaggagaagaacaaagtcagaagactgatagtatctaacttcaagacttactataaagctatagtaatcaagacagtgtggtatttgtaaaggaaaggacaactagatcaatggaaggaatagaaaacccataaatagacccacataaatatagccaactaatctttgataaaacagcaaaggcaataaaatgaagcaaagattgtcttctcaaagaatggttctggaacaaatggacatccacacacaaatcactggatctatacccttcacaaaaattaactcaaaatgaatcacaggcttaaatttaaaatgcagaattataacactccttgaaaataacatagaagaaaatctagatcgccttgggtttggcaatgactttttgactacactacccgaggcacaatccaaaacagaattgataagctatacttcattcaaactaatttctgctctgcaaatgccactgtcaagtgaatgaaaagacaagctacagaatgggagaaaatattttcaaaacgcatatctgataaggaactgttatccaaatacataaaaatacttaaagctcaacaataagaaaataaacaacttgatttaaaatgagccaaagaccttaacaggtatctcaaaaaaggaaatagatggtgaatgcatcggggaaatgcagattgaaacaagatattgatacacacctactggaatggccaaaatctaaaacactgacaataataaacgctggtgaggatgtaaagcattcattgttagtgggaatgcaaaatggtacagccactttggaagacagtctagcagtttcttatgaaactaaacatactcatatstcatgaaataaatatgagaggcattattatttaagaataataaagcaaacaattataattcaatatttttaactttttcctaaaaataacaaatagttcattgtagatgtttacatttgtcccaaaaatgacatttcaagaaatcagctatcagaatgattgtttcacagtagacttctttgttatattgcaacaattgacggctgaggctgtacatccttcttcagcttcagattgaatatactaagcaaaagactagagggatgaagtataaaaaacagtactcttctaagaaagctagattatcttctcttgattctttaattttcattgactgtcttcctgtgtcgtaccttaacactgataacctcatcttagccggactgaaaacaagtgacctattaaaacttcctaataaaaaataacattcaacaaaagttaattctacccccaaatacatttttttagaactcagagcaacttgggtttaaatccaagcttcacaacttatcagctgtgtgatattaagcagagttgtgggctttggtcattcctcatgtgtagaaacagagatgatgttacttggcattatgggatgaattgtatctccacttcaaaaaagttgtacgttgaggtcctaacccccagggccttagaatatgactgtgttttgagacaatgcctttaaagaggtaatttaggtataatgaggtcatattggtggaccctaatccaattggactgccactcttacaagaagaggagctttggacacagacaggtacagagggaaaactatgtcagaacacaggaagaaggcaccatctataagctaaggaaagaggcctcagaagaaatcaacccaaaataaatcaacttgacctcaaacttctagcctctagaattgtgagaaaaacaatttctgttgtttaagccacccagtttgtggtactttgttatggcagccctagcaaactaatgcacttggcaaagttgttttgttttgtttttagtctagaagagagtttttgtggaggtatctgtatttaattcctgtgagtgttgtaacaaatttccatgaactgagtggcttagaaccgcaggaattaattctctcagttctggagagcagaaactgaaatcagtttttctgggataaaatcaaagtgttgccagggcagcttctggtgctaatggtgacatactccaaactacctctgtggttatagtgccttttctcttctgtctgtgtcaaatcttccttcacctctctctctctctctctctctctctctctctctctctatatatatatatatatatatatatatatatatatattcttttttgaagacagcgtgtgactctgttgcccaggttcacgttcagcagtgcaatcacagcccactgcagcttcagcctcccggactcaagtgatcctcctgtttcattttgcctctctcttgtagtgacacctgtgactgcatggagggtccaccaggttaatccaggataatctcccccatctcaaattctttgcttaattccttttataagagtcatttttccatataagataacatgtacagggagggattaagacctggtattttgggggtcattaatcagtctactacagtgtgatagagggatgaatttggatactcatctaatgaatgcaagttgccttcctgtgaaccttgagttggtaatgttcatgaacaagatgtttagtgcacctgttctttctgagatcagagagtgacgaagagtagaaaagtgaaactaaaaatactgaaacagttaaaaaatagcagagaatatttcccctatagtgacctcaaatttgagctttaacttcccatttaaaagttttagattttatatgctggaactgaagtgtttttaatataaataatagaatacagatctggccaatctgttggcaaccttgaagtgtgttgacaaatctttatattcactgtaagatttttgcataccagaaatgttgcccctgtcccctctctgtctaccttcccccatcaatcagcacaggcaaaggccagaagtgacaagtgattgtgtactagacaagctaatgtttgtgtggagaaaacacttttgttccctgaatctctggtggcaaaggacccagaactcaagaagcaaatcttccagtctcctttaagccttctcttccataagtggcctcctccctggaattggaaaccactgtcaagtatctacgtccctgttggcccagcgtgagacttctacacctttggctctttgaatgccacctgacatgaaccctctggccacttgcaaaaggaggtcagaggttgctgccactcatgctgctaataatgtctgataatgataaarccacgtcctgtttgtcttgtattttatcataaagagcactttgatgtgcagattctctttccaaggtgttaggaaaacaaaagtagataagacacattttcaacccttaatgatcatttcaatccagttaattataactcgtttaatcccagaaatgtagaaaggaggataagagagttattattatccccattttccaaatgaggaagctgggtgttaaaaaataattttcagaaaaaggttaaagtgtgactttcatacagatataaaaatgaatagacgttaaagattttgtttaacacattcaatgagggaagcagacagatgttacaaccatttcaaaaaagaagtcaagaagcacaaatttatatggcataaaagaatattgaaattaatggcaaatgaaagcaactgtttttcccccttggggataaaggtgaggaagagggaagtcaatagagcttgtggtgcacaggacagaatttgtgtgactaccaggtaagtttaacaaagagttgtaaaatagctccatggaatcagatcaccagaggaaggatgcataaatgcatagatttccaaatagggcctggatgtgaatctcagactttctgacaccaaattcaggtttgtttcactctaccacattgtcctagcttctgcaaaaggtgctcttttgtcaccttaagtcaaagaaagttaccaaaaaagaaaaaaaataggaaatgaaagcataaaaggtaaactggtcagaggtttcctgctattctgctttgtttagaaattctcactgaggcagccagtaagccaagatgcagctgaacccaactcttggagagattgcccgggcctctgcccatactgaggcacagctcctgaaatgaagcccgcttcagaacttactcaaatgcatgttgcttcttattgcagctggactagtagcttgaactgtgatggaaattaaacgtctgcttctaaatcctgacaggaatctcctaaacagggtcaaaggccacctgtcttagtcagctcaggctgccataacaaaataccatagactcagtggaaacaatagattttattygttcattcatttattcatccattttcacacagttctggaggctggcagtccaagatcaggatgtcacatggttgggttctggtgagaactctttttagcaaccatcttttcatctacttctatgtcctcacatgggaaagagaaagtgaaagctctctggtatctctttataatggcactaatctcaccatgagggctccaccttcataatctcatctaaatctaatatctcccaaaggccccatctctaaacgtcataacattaggggttaggacttcaatagttgaatttgcatggggaaataattccatctatagcaatgccaatatgtgaactaactaacaggcttaagccaggtacctgagatggtcacaattatgggcaagaagatgttcaatccaaataatgaaattatagcagtttacaaaaatgttacaatttatgtttctgaatgttccatactagaaataaatagaaaggcaccacggtctcaaagtgtgtgtgtgtgtgtgtgtgtgtgtgtgtgtgtgwgtgtgtgtgtttataaattttatttgatagtttcaaattactaggctgaagaaagaagaacattagcaaaaaatgatagtggcattaatacatttgctcactactaatgacctaaaacgtggcaattcaaaaggaacaaataattatttcagtgtagactgtcacagaatctagggcatcatcaaactttgatccctttgggctttttacttggaaagaatgcagtttctctttttttttaaccttagctttattctccaaacattttaaaatttaattcatgggctattattttgttcataagctaagtggcttacccaaaaaaaaaaaaaaaaaaatttctttctttgtaccagattgctaaatacagcctctttccaagaggctttattgttttgttgttgctgtttttattttttattttttaatttttaattttttatttccacaggttttttgaggaacaggcgttattttgttttcatgacatcaccccattctcccacccctggtccctgacaactgccattctacagttgagagatttggtgatttgtgagttgttttttatttactttaaaaattttttgatttgttttttatcatctttttcaatttagagatgttttgcacaagtaaaaattatggggcttattcagtaatacatgtctgtaaggaataaacattaagaaacccaaattagggtctaaattaaggaattgtgaaacatgaagaataaagaaatgaggaagtgagaatatagatgatagacctaagagatttgtcttaagttatggtcatacgacaaggagaggggaagtgatctaatttgtcaacaagatgaaataataaagcactcacataaagaaatgtaagtttatatatgatggtttgctttgcaggtttcctgggaccacagcacaagccagacactcacatgatgcaaattacttatgtggataaataatagatatgcacatatcacaagatattttaacaaaatctatttagcaacaatttgctagtaatacactatgaataatcataattcttcattgacttatatcctaccgagtctcggtcctgctttctgacagccagctccttaatgaattactaaggacagtaggaagcagccgccagaagatgctgcttgtgaaatttaccctctcgaaaacactttgatcatgtctcttccctaattacaaacctttactggcccctctttgacattgaccacgtcctgaactcctaaagaggcaaaaatttgtcctttattaactagcccagtccatctcagacactctcccctaaaaactctggtcacattaagctcactgtcctctcaacttctgtgcacctttgcataagctgttctttttactcagaatgctctccttcctctttgtcttaataacatgggctattgcaaaatgacaaattaccactgtcaatcttatccagatcacttaaaatagttgtttgttgaaggagctatgcaacttaaactcaggaaatacattgcaatatatctgcatttatccatccattcctttggaaacctgatcttatttatgtctacccttttgcaagcaggcttggttaagttcaacatgttattctaaagattttttgtccttgattagcttaaatcaaatcattggcaatcacgtctctcattttcaagtctcaccacaagtatcatctagtctcctttactagtaattccatagatcttcattcatacttggggtacagcacttccaatgagatatataattgatctttttgcatagctgcctctttcaggctggatagattcctgtattcacctttgtatcctcagctctagcacagggtctcatacataattgttgttcaatacatgatatccttagattcaaactcctgtccagtgacattggacactacacaatttgctcttaatcattcatttaatctttcaactaaaataaactgagcatatactatgtgtcagacattgggaatacaaagactaataatacatcgtgcctacctagttctaaaatccagaaaaaagaagtaaccttataccttgcatgtgagagggttttctaagacacttatgagaatttgatttaaaaaataggaaaataaggattatacccctttattagtattacacaggaaactgcacttcacagacatgaaaatactgtttcaaagataaatacagtacctcacacattcagaacagtttgacagctgaaacacagaagaaattgttcaacatctactatgtaactgccaagctctgtgcaaaatgctgtgaacgtaaaaacaagacacaatatttgccattatgtaaacttgctatgtttggggaaaagtatactcccatgaaactgttaccaaaatcaatgctataaacttaaccaacacctccaaaagtttcttcctcttccatttttgttgttttgttttttctttttgttttttgttgttgttgttgtttttgtttttttgttttgttttgttttgttttgttttgttgagacggagtctcggctcactgcaagctccgcctcccgggttcacgccattctcctgcctcagcctcccgagtagctgggactacaggcacccgccaccgcgcccggctaatttttttttttgtatttttagtagaaacggggtttcaccatggtctcaatctcctgacctcgtgatccgcctgcctcggcctcccaaagtgctgagattacaggcgtgagccaccgcgcccggccttctttttggtaagagcatttaacacaagctctaccatcttagcaaattttaaaatatacaatacagtattgttattcataggccccatttttgtacagtagatctccaaaatctactcatcctacataaatgaaactttgcaacctttgaccaacatcaccccattctcccacccctggtccctgacaactgccattctactctctgctgctatttgtatgactattttagattttacatatcagtgagatcatgctgtgtttgtctttctgcgtctggcttatttcacttaatatactgtcttccaggttcatccatattatcacagataggagaatttcctcctttttatgggctgaataatatcccactgtgtgtatgtgtgtgtgtctacatttacatctatatccatgtatgtgggtgtgtatatgtatacatacatgtatataatgttttctttgtcgattcatttgtcaatgaacacaggttgtttccatatcttggctactgtgaataatgctgcaacgaatatgggaggatggatatctcttcaagatactgatttaatttactttggatatatacccagaagtgggattgctggatcaaatggcaattctatttttaattttttgataaatctccatattgttttccatagtggctgtaccaatttacattcccaccaacagtgtacagaattccttttctctacattctcaccaacacttgttctccttttttttttttgataatagccagtctagcatgtatgaggtgatatctcactgtagttttcgtttacatttcactaatgactagtaatgttgtacacattttcatatacctattggtcattttgtatgtcttctttagataaatgttggttcaggtcctttgcccatttttaaatcaaattatttgttgttgttttctattgagttgtaggtattaaagtctacaaacattttcccccattccctaggttgccttttcattttgttaattgttttctttactgtgcaaaggctttacattttatgtaatcctacttgtttattttttgttttttacctgtgtttttggtgtgatatcccagaaatcattgcccagtccaatgtctgcaaactttttcctctatttaaagacttttattgtttccagttctacatgtaagtatttaatccatttcgagttaatttttgtatatagggcccacttttatgctttacatgtggatattcaattttcccgacaccatttactgaatagattatcttttcctcattgtatattcttggcatccttgtcaaagatcagttggcaatatatgtgtgggtttatttctgggctctctattctgtttcattgtcccatatatctgtttttattccagtaccatactgttttgattactgtagctttataatatgttttgatgtaatagaatgtgatacctctggttttgttcttagtgctcaaaatttctttggctatttggagtcttttgtagtttcaagtaaattttaggattcttttttctatttctggaaaactgccagtgggattttgataaagattgcattgaatctgtagattgtttggggaagtatggacattttaacaatatcagttcttcaaatccatgaacacagaatgtccttctatttatttgtatcttttaaattttatttcatcaatgttttgtagttttcaatgtacaagtctttcacttacttggttgagtttatttctaagtactttattcttttagatgctattataaatattttttaaattttctttatggataggttgtttagtgtgtagaaacacaacaaatttttgcatattaattttgtgttctgtaatgtaactttactgagttcacttattagttctaacagtttttttgtggcacctttaggattttctacatgtaaggtcatgttatgtgcatgatataagatagttttacttttcctttctggattgcttttgctaggactttcaatactatattgaatagatgtggtgagagaggacatccttgcctttttccaggtcttagagaaaaaactttcaggttttcaccattgagtatgatagttgtaagaaatacacttttaattcattaactataaatgcctgtttcaaaatgatgttagcagtataggcaattatattcatataaaattcaaatttagattataaaaagctaattgttgtctagagactaatataggttaaacaaaaacccaccttagacaccattaatgtatctgtaaaacatactcacatttgccactcagaaagaacagagagagaattcaatttaagacccaaagcactttctcctcttcttgccattccaacacattctgctactctttttcattatggtatctacagcccacaaagctgcttgggtattgttacaacagcttcacaactttttacattggtttggaatcagaaacaacataatttagaagcaaattcagtaaattttcactatcatttactcattctaactgaagtcttgctgctgcttgatctgtgacttttacaatggttgctgttttatttctttgttttggcattacaaatttatttcattatttgaaattgatgcattctaacattaccttttgtaaagcagacaattttatttctgatttgctgtcaatatctccactcatcgatttgtctacatggataagttattctgaacataataatgatgtatagttcaatgtgcaattgaactataaaatctttaattgatgcctagtgccatactaaataaaaatcaatgatttatcaatcatttgaacatttgaacagtttaacactttctaaaataaatacagatcaattagagacatgtaacaactaaacttccagagaaaattacaattaatatcacaggttaattgggtgagattgcgttgttagcattctactcaatttaaaattgggattcatttcttcaaaattggttagacatacattttgtttttatctgatcatctataagtacatgtacatacaaagatctcccaaggaaaagttttgggttgttttgcatgcattgtattttttatactatctagaatacttagtccataataattaaaagtatatttgttaatatcaaactatcattttaatatggtatgaattacataaaaatacagactaatgagaaaagcaaagtcaagatcaaccacaagtaagtccatttctatccgcccagtcatgaagagccgtgaaatctaaagtaccatatcactccagttctctatgcctgttgaaagtatgccagattattctttcatccggcattagcattttgaacctttaaggtttctgtagttctgtgacacatttattgaatattgaagaggaagaaaggctcagcagaaaaccatcgttgttttaagttttactgaggtatgattcacatttcatcaacagcacatatttaaaatgttaaatttgataagttttgacatccatgaaaccatcaccacagtcaagatagtgaacatattcattaccccaaaaagtttcctcatgcttctttgtaatccctctctcccttgttttcctctactcattcccctcttcccaaccagatctgctttttatcactggagattattttacattttctagaagtctatataaatggaatcaaacaacatgcactttttttggtatggcttttttcagtaagtatatttattttaagattcatccaaattgtttcatatataaatcttttttaaaaattatattgctaagtaactttccatttatggccacaccacaatatatttattcattcatctgttgatgtttatgttcttttcagtttctgactattacaaataaaatggctatgagcatacatgaataagt

SEQ ID NO: 94029 - DNA, 50686 bp, Homo sapiens
gcaggtggaggagccacagaggaagaagagaccttgcgtaaggcgaaactggaaatgtaaaatgggtgaaagaagtggagtgtgcttttccagcaaaggccatttatccattccaagagggagttaagagtggcagttaggggataagaccaggaccagctatgatggtttggaggaaaagtataagctggcagtgtagacaagggcagggcatgtatggagaggtgaaaacgaagaataggagtatgactagacagaagagagcagggatgaaaagtttttgggatgcagtctaagtagtgggggtgactgcataaggccctgttgcaaagactctggtaaggaaggatagacctaacaaaatgaagggatgtattaggctcataagggttactactgttcttcagaaatgtgggtgagtttaagggaagtaggggtgagtactcgcgacttccagaaggaagaggagagatcaggctggctgtccaatggacacggctttattctggaacggtgaacccaatggggagggtcctgcaggaggacggcagttagggtattatagatgactaagtagggtccggtccgtcgaggttgtagagtttgaggggtcagattcttaacaagaactgatcgtccagatagggtgtcttcataaggctgggaatctggaataggcaagagaagattagcagcctggcaaatttcctgtctagcctgctggaggactggaagatagtcacctagagggctggtgtctgggacgaggttggggccgagcaagaaagggcatccatataaaagttcaaatgggctgtactctgtagcatctcgaggacaggctctaattctgagaagggaaagtggtaaaagtactatccggtcctttttaaattggaggctgagcttagtgaggtgtgtctttaaaagaccattagtccgttctacctttcctgaagattgaggacgataaggggtatgaagtttccactgaataccaagagcctgagaaactgcttgggtgatttgactaataaaggcccgtccgctattggactgcacagaagtgggaagtccaaaccaaggaattatgtctgacagaagggaagaaatgaccacggtggccttctcagaccctgtgggaaaggcctctacctatctggtgaaagtgtcttcccagaccaagaggtatgttagtttcctgactcggggcatacgagtaaagtcaatttgccagtcctgggcaggggcaaatctccgagcttgatgtgtagggaagggagggggcctcaacaatccctgaggagtagaatagcagatagaacacagagaagcgatttccttgagaatagatttccacgatggaaaggaaatgagaggttctaagaggcgggttagcagcttataacatacatggaagaggttatgaagtgacgacagaatagaatgggcctgtgaggctggaaggagatattttccttggtctaagaaccatttaccttgagtggggagggattgataggtagaaacttcagtgggagagtaagtaggagtgactgatgagaaggagaaaaactggccgtgagggacagaagtaggaatgctagctgcttctttagctaccttatcagcataagcattgccctgagygacgcgatctgatgccttttgatggcccttgcagtgaatgactccagcttcctttggaagtaaagtggccttgagaagagtttttattaaagaggcattaatgatggaggacccttgtgtagtgaggaaacctctttcagcccatataacagcatggtggtacgggatatggaaggcatatttagagtcagtataaatattgacatgcagtccctttgcaagagtgagggcccaggttaagacaatgagtttggcttgctgagaggtagtggaggggggcagagtggtagcctcagtgatagatgtggaagacactatagcatagcctgcctttgccagtgattggcgattgggcctggaagaactatcatcaataaaccaagcgtggtctgggtggggaacaggaaagaggtaatatggggaaatggggagaatgaatggtttcgttaggatggcaaaaccaggtatctaaaggcaaaagtacctaaccatgcctaggaaggaaaggagttgttttgtagaaggggttggggtttgggagattagctggacatgattagcagggagagcacatgtatttttatgaagaattatgccgagataggtaacggatgaggaagaaatttgggcttgactgaagtaatgggggctgtccctgaagccttgcgccagtacagcccaggtaagttgctgaggctgatgggtgtcagggtcagtctaagtgaaagcgaagagaggctgggatgaaaggtgcaaaggaatagtaaagaaagcatgtttgagatccagaacagaatgggttatggaggggtaaaatgggggaattgtaaggagagtttataggctttataaggccatgctgtaacaagtgagtgataacaggctttaattcttttaaagcgtgctgtgggatgggatattggtgttgagcagggtaagggtgattaggttttaatgggatggtaaggggtgcatgatcagttgccaaggagggagtagagatgtctcatacttgtggattaaggtgaggagatacaaggaaaatatgtgaaggaggctttgaactgggaaaaagggtgacaatgaggtgtggctgtagcctaggaatagtcagggaagcagataatttagttaaaatgcctcgacctaataagggaactgggcaggcgggaataactaaaaaggagcgcataaaagaatactgtcccagttggcaccagaattggggagttttaagaggtttagaagcctggccgtcaatacccacaactgttatggaggcaagggaaagaggcccttgaaaagaaggtaatgtgcagtggatagcctccgtattaagaaggggatggactcatcctccactgtaagagttacctaaagcatctatcatggtccaggaggcttccaaggcgatcgggcagtgtcagtcttcagccactaagccgagaagatctgggaaggagtcagtcagtgagccttgcgccagagttccaggractctaggaatggctgccaggtgagttggacagtccaatttccagtggggtcctgcacagatgggacattgcttaggaggaatccgggctgcagacattccttggcccagtggccacattttcagtacttgaagcaagatcctggggtaggaggtcttggaagaacgcctggccactgcggtttaggcgttttgaaattcttgtatgctggagatgtggctgaagtttctctcacagcagaggcaagtaattgccactcttctctattattgtacaccttgaaggcaaggttaagtcctgttgtggggtttgagggctggaatccaatttttggagctttttctaaygtcaggagtgggttgggtaataaaatgcatactgagaataagacggccttctggcctctctgggtctagggcggtaaggcgtttaagggttgttgccaaacgggccatgaactgggctggggttttatatttgatgaaaaagagcctaactgttttgggagaggtcggataaagaaaacaggagcaacaaccttgactatgcctttagctccagccacctctttaagaggaaattgttgggcaggtggggtagggctagtcaaggaacaaaaccataagccggactaggtgtgaggaggggaagtgatagaaggattatagagtgggggaacagaggctgcggaagaattgggacctggctcagcccggcgagcaggggagaggtcagatggctccacagaaaaggaggattcaaagtactcagagcttggggtggagaccgaaggaacacacaggagagaaagaagaaagatttgggatgagtcgcattgggagcagagactagggcgggactgatgtgtagaagaatgcctggatgtcaggaacctcagaccatttgcccattttacgacaagaattatctagatcttgtagggtggagaaattgaaagtgccattttctggctatttggaaccactgtcaagtttgtattggggtcaggtggtattgcagaagaaaataaggtgtttaggttttaggtcaggcgagagttgaagaggttttaagttcttgagaacacaggctaagggagaagaaggaggaatggagggtggaaggttgcccatagtgaaggaggcaagcccagagaaaagagagggcagagacacagggggggtcggtacttgacaccaaggtgaaggatcaaggcaggtgtccctgtggtgatcagacacctctgaaatgtgggtgaataatcaggcaggcatccctgcagtgattaaacaccaagggaagactgtcttctcgagtccgtgaccagtgccggagttttgggttcacggataaaacacatctcctctgtctctatcagaaaaggaaaggaactgaaattaagggaagggatagattgaagggtggtgccaaaattgaaaggagaaagaggttgagagatagtgagagaggttggagaagagagtaaaaagaagctgcttacccaatttaaaattggtgagatgttcctggagctggttggtctgaggacccgaggttgtaggtggatctttctcacagagcaaagagcaggaggacaggtgactgtcttatcagttaaggcaggaaccggccattttcacttcttttgtgattcttcagttgcttcagcattttcacttcttttgtgattcttcagttgcttcaggccatctggatgtatatgtgcaggcttgggctcagaggcctgacatgcgtgtgttttgtgtttttctggataggcatgcattcctatggaggaggtaagcagggggaagggagctcacattcatcagacacctagtatgtgtaggaaccttctgcatccctggaaggatggatgaccccacatgtgaaacctctcgtgtggttctttttggaattaactaccattgctgaaaagggcctacataaaatatcaaattttaacatgctggaatttttctttattttttttctccttcaaacatttgtagctctttatatgtggtatttcctctgtgtcagaagggaaagagggtgccctttggggaagttctcttccagactcctagaagagaatctgatttaccttaaatgcacaaacaaggccttgccatgtcactggccaaccgcagacaaactacttcagtcacagaaataatttggacacttttgctttttaaggaaaagatgatttccctggatttttttcctgtgaggacgaggcattccaaaaccccagcggggtcaggcacagttcgccaactttatgttttggggggcagcgcatttgcttcccgaagtgagttgcgaaaccgttttctagcgcgcacggggctttcatctcttccgtgcatgcgaacggctttccgagatgccccctttatgggcttggccatcgctacttttgttacaaattaacgtctgggactcggactgctgccaataggaaactcccgcgattcgctgcctagttcgccgccctcacaagactggactctgcacaggccatccatgcccgctggtgcacctcgctctctcgcacgcttaacccgcggggacgcccccgacctcccacctcagccctcgccacagttagtcccgcccttccgcgcagactccgtggagtcctgtcacgctctccgcgcgctgcggcagccgggagattgtgaagggcacctccggcagccaattaacacccgcatactgggcgggaccacgcttgggcaggcggagggggtcgaccgaaggcggggacttttgagtgacaaggatgatggccaaccgtcggaggcccttctactgcgccccgcccctgagccggccgcccagcccccagtggggttcccggcgcggggaatgtcccgggtggagctggctgagtcgcgcgctctgctccacccgacggggctgtgtgtgctgggcctggctcgcggcgaaccgagatggcagagcagtcggacgaggccgtgaagtactayaccctagaggagattcagaagcacaaccacagcaagagcacctggctgatcctgcaccacaaggtgtacgatttgaccaaatttctggaagaggtgagttggggatgagcggcttggggcgcagggagcgtgggccgggtttgggggttcactggcatgacctgtctttcgcggcccggagtccgcatacctacgcctaggcgcgccccccgagttcgctcacctgcgcgtgtacgcctgggcgcgcttccgagtccgcacacctgcgcgtgcaagcctgggcgccccccaccgccccaagtccgcacacctgcgcgctcacacctgggagcgctccccgagtccgcacacctgctagtgtacacctgggcgctctcctcgagtccgcacacctgcgcgtgcacacctgggagcgctccctgagtccgcacacctgcgcgtgtacacctgggagcgctccccgaatccgtacacctgcgcgtgcacacctgggagcgccctgcgcggcggcatcctcgctaggtggtgctggagcagccttccggggatagcgsgcagccatgcgggggatttaaatgatccctttctcccttgagtttgaatagaagggtgtcyttccaggaccggcggcattcccgcagtggccggctggagaccacccaccccgagagctgcggatcccgccggaggggaccccaagtgcggaggtcgggtgtggtccgggcctgcgcttcccgcggcagccactggccgaccttgcggtccacacccactcgcgttcgcgttcacctggaagaggctcggtgttaattaaccttttccagtcacgccttggcagccaggtgccgtgcttgactcctgagaccgcggtgtgtggctggagcaagaacacagaggccaggcagagcagcggacgttctgcgtgggactcgcccctaacagctttggaaggtgtaataggaaacgttggttaacttgaagacattcctttgataagattctttgcattcggttataatttttgccgcacacgctaaggggcgcttttggtgattgtcttagatcctctggaagtgttttactacttttgggggagtctcaatcataaatcttaacgcatgctcacgccccctcccaataatgagaaggtttagtgatgggaattttttacatagtcggggagcaggggacaaaaatagatgcctggtctgagctggatcacagtttatatcagaggactttgtttttgcagaaaatgttaaaatcaaaaggcctgttttaaaaaatgaggctgggccaagcacggtggctcacacatgtaatcccagcactttgggaggctgaggcgggtggatcacttgagtctaggagttcgagaccagcttgaccaacatggcgaaaccccatctctaaccaaaataccaaaattagccaggcctggcggggcacgcctgtagtcccagctactcgggaggctgagacaggagaatcccttaaacctgggaggcagaggttgcagtgagccgaaatcgcaccactttgctccagcctgggggacagagtgagactctgtctctaaataaataaataaaattaaataataaggctggagttgatgtttattggtaaggtatttcactctggagcagtgcccgaagataaagtcatgttaccatttagtaaggaggggtttatgttgggaaatcagagctgacctgtcctctccctcctgcccggctgcagatcttgtcatataacatcaattctcattaactctaaatgtggaattttaagatacagtgtgtgctttgtctatttgtgcttatagaagaagtagcataagagaatattaggwtattttatattatgaagcattttcttcttttcttgtcttctcctaaagcgagttttttcaaccctggcactgttgacattttgggccagccgatctttgttgtggcgtctgtcctgggcattgtaggatattgagccacctccctgagttctacccactagatgaccggtaccaccacctcccctatttttttttttttttttttttgagacagagttttgctcttgtggcccaggctggagtgcaatggtgtgatctcgactcactgcaacctctgcctcctgggttcaaccaattctcctgcctcagcctcccaagtagctgggattacaggcgcacaccatcacgcccagctaatttttgtatttttaatagagacagggtttcaacatgttggccaagttggtctcgaactgctgatctcaggtgatccacccaccttagcctcccaaagtgctgggattacaggcgtgagccactgctcccagccctacctcccctatttatagcaacccaaaatgtctccagatattgccagaggtcccctagggcacataatctctccaacttgagaattactaaggttactgtgcatgactttaggggtagattttcagagacgataatagggaagtgaagattattgttaaaatgtactcaaaactatttactttcacatttcattcctgtgagtcaggaaaggagggattgtgcaaaaaattttccgagaaaaactgagagatgagagcaagctcttgagtgggtaaattagctgaaaacaaatttctttattttttcttactcaaagtttttgtggagaatgcatctcaaataaaatgaacaagagggtggctgacccctggaacggctaggaggatggcgtgagtgaggaggctggggtctgggagaaacacaaggagttagtttggttttggtcctgttgactttaagaggttggagggatcttcaggcattgcgagaactgcatgcgtttctgcctccactgtctgccaacatgtggttctgggaacaagcaaggccacttagcctttcactggattgtgtctgacctctgggcacctcccgattcgacctcttatggacgtgtttttccatttgccgtctttattatttgctttgactttctgtgaccatctcttgcttattgcatgtcctggtcattggcttccyagcccccggcaaagcctctgggagcctctctctgggttctatctgagaytctagccaggattccttgcaggtgacttcctgtgctcctggggttatatctccaataagctcactcgctcagagctcttcagcacactgccctgccaggtagtttgttatgaggctagtctgtttgtctgaaacgtacttttaaaacagaaatgagtgcagaatgtctctgtctctcttccccgcttgcccgatcctctttcctgtcttctattgttgaaaggctccagaatttcatgaagcctttgtgtgttaactaacaaatattttatctcacctaatttacctaaataggaaagatttatcttctccttctaactctcaaatgaactttcagtcattatgggctagacctttgtttactgtgagatcccccatccgtatggacaggatttctcatggctgagtatttccccttctttcagaatgtcctagatttatgtgcatgtccgtgttcatgttgagaaggtgtgtgktgagatggtggagggatcctgctctgctggcaggtacaagccaagaacacakgttgaagctcacaggtgcagcatgtgctccgacctcctgaaataatggccactaaagctgtttttgttgtttaggcggaggggtagaaacctaagagggaagactggcttattattaatggcagtcgacatagcagcaggtgcttagttactgtctgatacttaaaagattttgagctttattgcctacatattttgaactagatttttttttcaatcctgagttctagtttttgagtttatatttgtgaaattgagtctttgcttgatcatagaactttaagggacagttatttgaaatgaaaacttaggcatttaggaccagggggagaaatgtttgcatttccctttctgtgatttgggcagcagcatctattcagtttttaaaagagctgtggaggggagagagaaaggtatcctgtaattaacaacacttccattagctgttgcttttggttcaagtcagtgggtgtttgattcgtgaaatagatactgtcctggaaaattttataaagcagaatgtctttttgtgaagttgtctcctctccctttacatcataaaaatggaaacttgcttctgtagaacattttctagtgttcctgggattctgatagtcttggacctgagccttaaatgttctttacagcattctgcctcatagaagctattggctcctgactcactttgatttttggagtcttaaaagtgtcctttctagcaggttttattgtagggacttgctctttgttattttccattgaacatggctgcctatgttgcgtagaccagtggttctaaggcttgggaatcgaggaagagagtatgggtgctgaaattcattgcccttaattttgaaaaacatagaacacgtatctttacccttgttaaagctaccatatttagggctaaaatactaaatgcctttgctttttgcaagaaaatttgatagtattctgaatctcatgctactaaaggctgcagttggcaaatatgcctttgatgcatgtaaaatgggaacattattattatttaatatataccgttaggtaaataaaacttagaaattacagagtctgtagaagggaaatataaagttattgttggtagtgttggtggcttaggcatcttgggtaaagtggtagtaaaaccacatcttagaaggccacctggggaatgtgaacccgtgaggcttttgtatatttctatatatatctctatattttttggtaacctgttgctacttttgaaaagaggttccaagaggcaactttgttttgaaacagtaaagaaaacagtaaagaaacagcaaattaacttttgctttttgattatcttaaaggttgatgaaaattgtaaataaggaagggaaaacacatgcaagccggctttggtcaatcaaggaataaataacatgcacaattttactgaatgtgaatgtctggtattctgaaaagtcctcctggtgaagatggctgataagtgcctttgtagttgagtggagtctgaacaaccctgtcccgctgggcattcatgggaaagcactgggctggggttaggaaaactagacctggtcttagacatatcatggrggtgaccttgggcaagtcaggtatttctttcagtcactttccttgttctgaagtgggaactattctgtcactgccatctgcattgggagaaatgatatatgtgagaacactggaaaaaatatgtagagaaggcatttaagtgactatattttgattgaattaaaattttaaaataaattgtttttatgtggaaggtccatttagtaggaacatatctcaggaattatagtgttaactagtaaacaaaatgactcaaaatacaaatattcacwtgaaatataattgttcaggaatgtgtgctttgcaagattggaaatcatcccatttcaggagcttttaaacatacaactttattgtgtaaggggaaaataatacatgatcatgttaaggaagtggacagtgtggaaaactgcaaagaagaaactcaaagctgcctggagctctgctccccgaaggtggccagcttgagcagtttgcacactcactactacaacaccttgctcgyggatgtgctttacatccatggaaatgtgctctgcatgctgctctgtaatctccctttttccccactaaactaggtgttgagggaccagtcctgaatttcagtaactcctgttcccaggctgcctccttattgtatagagggatcctaatatacggaatcctctttccttccatgtttttaggttcccacctgcaattacctccttatggtagatctttgtaagtgggattcttgggtgaaaggatgtacacttctacttttttttttttttttttttttgagatggggtcttgctgtgttgcccaggccgtggtgtgatctcagctcactgcagccttgacctcctgggctcaaccagtcctccctctggaatagctgggaccacaggcatgagccaccatgcccagctaatttttgtattttttgtagaaatgtagtctcttgttgcccaggctggtctcgaactcctaggctcaagtgatctgccccctttggcctcccagagtgctgggattacaggcatgagccactctaaattttgatggatgttaccagagcaccctggggtggcacaccagtgtgtgcatttctcggttcttaggagtggaggaacttggttgcgcctcattcacctcccttcctgaatttggctgtgtacttctgttaaaaagggaaatgtatggaataattttttatcccctttagcttataaattctcttaaaagtgaagctgtggcaagtaataccttgtctattctatgaaagaatttcattgtctgaaggctcaaagcatcagaaaagtgaccggaggcagcagctgactacatgggaaactgagtagcaggctcagagccatttctggagtctcaagagtgtcctttctagcaggttttgttgtagggacttgctctttgttattttcctttgaacatggctgcctacattgcatagaccagtgctttccaaggcttggggatagaggaacagagtatgggtgttgaaattcattgcccttaattctgaaaaacagaacattttaatcaagtgtgcttcctttcctattacccttggacctagttttcttgggaacatagtcttgagtgtatatagtaactgggtatctgtgccttttactgagttccaacatggggaccgggagggtgagctgaagattgggtggggacagctccgttcttgctgttgaatagaatctggcctgtgctgcctgttggcttagagctgacggctctgtggatgatggcaagaagttactttcttacatcygtagaattctgtctctagcaggcccatgccaaaatgatggcatctgaaccagcactgacgctggggaggctctggagggggcgagggataagggatgtggacctaagggaagggatggggtgattaacagcctctaggctcagttaagggtcctctctgcctggctggtgggcacgggagcctgtctgaaatggaatcacttgaactcttctgtagttgagggcctggggagtgtcagtttgcagcttgtttctttcactgcctgctattgtttgttcttggcagacctattcattaagctttgtgcagctgtgtccagaattagccaggtcacaaaatatatccagacttctttccctcgtcttcctcagaaagtgttaattaagtaaatgccattcattaatcgtccccaagtaaatgctattctttaatcctcccctccccaacaatccctagtgagctaataagaaaagtgatagcagtggacgttggctgaatgtttatggacattcagtatgtgctagggagtgtgccaagtgctttttgcacataaaaccttctttgcgtttgtgcttttaatctctcttttttttttttttttttttggagatggagtttcactgttgttgcccaggctggagtgcaatggtgcaatctcggctcactgcaaccttccacctcccaagttcaagcgattctcttgcctcagcctcccaagtagctgggattacaggcatgcaccaccaggctgactaattttgtattttcattagagatgaggtttcaccatgttggtcaggttggtctcaaacccctgacctcaagtgatccactcgcctcggcctcccaaagtgctaagattacaggtgtgagccactgcgcccggcctgtgcttttaatcttcaaaacaaccctatggggtcagtggtgattgtgtcctcccttttaaaggtaagacggtatgtcttagggagattttgcagcttgctcagcaagtcccacagacgataaggagcaaagccagggcttcagtccaggctgcgggcgctgcgacccagtgtcttcagtgctgagtctgttgctgaggcttgagatccaaggagtattgatgagaacctagcgtagctttaaaagcaaaagtgcatcccactgatacagagttgctgtcatttgctggagaccttgatcactggagagttctctggaggaaccagggagaaagcaaagggaatttgtgatgcaaatatctgaacaaagccaaaacccttggaaagttaatggacaaaaatatgcctttctttccatctgttgtcagtttactatgttgccttctaggaggtgaaggaaacagccattcctgtttcttgtagaggaatttttaaatagagggagtcggggtggagtcttcacggcctcagtttgtttgtgacccagatgctgctctcacctggcaggggctgaatcatcggtgtggttttggttcggaaagagattgtttgcacgtgtagtgggtatgtgtgaggaggcatgtgttgtttggtgaaaggcatcttaaatgactgccctgggaaggattgtttaaatggaaatccgaggaggttcctgctctgataaatccctcagtgggtcccgctcatctctcgccctccccttccgggtccatatcccctctgcatgtgccacgaggttggttgcagggtggttagaatatctttctcctccaagctgagagcagatgccctggtgtggcctctcttgtatctttgccacctctcatggtggccactgggcagtcagttctcaggatttcattggttccatcaaatgggtggtggttttatgagttttcagcttgagtaataaatgctatttatggcattgaaaagtgtgatttctaggagaagcacacaaaaaaaacttgatcttttggaaacagattgtcctttttctgttcagttcctttcaatggcttcctgttgcatttagaataaaattgtatctctttgccctggtttggaaagctctgaatgatctggtccttacctacctcccccacctcagcaaataacactgtgtcctccctgctaatgcccacacctgatcacattgaccctttctctttgtttctcaaacaagccaaacttgtttttaccttgaaacctttgccctggtttcccctgtgtcaggcttggccctgttcaggtctcagcatggtgtcccatcccgttttgtgcctctgctagcagttagaccctcccrgctgtgatatgctgctttttccacgcgatgagggctcctgcctgcccgcctgctgtgcacctggcccatgtccggtgccaggaagtcactcttccggggatggaagaggagagcctggtggaggaacagatacgagcccctgctctgtgactatcttatttttttccccctttttccatacacagygcatactagtgtgatcccttcttactctgtggcccttgtccggtgccagaaagtaacttcccaggatggaagaggagagcctggtggagaaacagacacaagtccctgctctgtgactatcttattttaccccctttttccacacacggcacatgctagtgtgatctcttcttactctgtaggccttggcctgggattttgtccctgaggattgcacagttagaaactagtgggactgtattgtgaaagtctggattgtgacatagtctcagagcatggaacacaagaatggcatcgagggaggctcccaggcagtcagtagaagggaagaggagaattaaaggtgaggggagcactttggtctgcattttccagtctcttcctgcccagagcccgggcctccacctgtgcctgagatcstgttccccttcccactcacagacattccctaagccacccgatgttccccagtataaaccaggcccctccaggccacaccctgctgggttattctcatcagtgttcctgctgttttctcctttcctgcaaaacacacacacacacacacacaccctcctctcctgcaaaaacacacatattcccttctcccctgaaacacacacatacacacacacacacacacacacacagcctcccttgactcttctgccccctccaggatttcctcatttttctgctcccctgaayagtagaagcctctgaaagggttgttaagcctggtctccaatccacctcctccattcccttttaaaccacacctgttcaccacagcttctcttgccaaggtctcccagggtgccttgtgtcagctctcagttctccaacacagtggctcagcagactctgacatagatgctcaccctcctgggttgccatcctctcctggttccctcctccctccacctcctgtctccttttcccacttctcttctgtccgacctccttattggagggcccccctggggcctgggcttttccgctttggcaggctcacacagtagcatggctttaatgtgctaatgaatcctggattgtcacatcctggccagaaagacctctgtcctgaactggctcttgtatccctgaggctacatcacagttagatgtccagtaggcttctcaccctaacgtgggaaacacacctgctccctctgcatgtccccatctcagcagatggcagttccattctcccagctgctcaggccaaaagcctgggggttgtrctcctctcttctcttgctctcatacccacatccagtccaccaggacattctgtgggcctaactttcataatgtcagaatctcaccaattttttaccatgtctactgctgytcccctggttggagcctycatcttctctcgcgtggtcccctcctgcccccgacagcatattctcaccataatagagtgacattttaaagtcagatggggtcagtccgtatactctgtttaaacccttcaagggctgattacactgccccattttaagacttaggatatggctgcagttgtcaggaaagtgtagttctggcagagggacacatacgtatgtccatgtagcagaatagagaggccagagatagactcgcacaaagatttccacctcattgttgacagagatggaaaagcaagtcgatagaggaaggatagccttttcagcacataattctggaacaactggacatcaataaccaaaaacataaaccttgactgaaacctcacaccttatgccaattaactcagaatggatcatagatctaaatataaaatgtaaaactttttttttttttttttgagacagggtcttactctgtcactcaggctggagtgcaatggcatgatcacggttcactgcagcctccaccacctggactcaggtgattctccaacctcagcctcccaagtagcgaggactacaggtgtgcaccaccatgcctggctaattyccctttttttttttttttgtagagacagggttttgccgtgttgcccagctgccagctggtctcaaacttctgaggctcaagtggtctacctgccttggcctcccaaagtgccaggattacaggcatgagccactgcacctggccgacatgtgaaactttttaaggtgacttaggattaggcaaagaattcttagatgtagtagaaatgtgatccattttcaattctttgcactggaagrttattccccccaaataacatatggttccctgcctcacctcctttgagtactcactcactatcacctcaacactatcacctgaccaccgtatttaagcctggatattaccccagccccctgcactgctgagcccagttatgctgctgagtttttccctgtagcatgtattaccttgtaacatacggtataatgtactcatttattagtttttgcttctctgtgtccttccactagaaatgtatgctctgtgaatgcaggactttttctcttttattcactgataaatccagtttttagaacaatgctggcacatagaaaggactaaatagttatttattgattgaataagaattaaaagtttataaatataaaatactagaaagctgatgtggaatggctgctgggtgacattgaataattttctgataccttattttatttctcctttgtctcacctgcatatttcaacccagtttattatgattaaacatgaaagagaggcctagttatttggcattgagaggaaaaaaaacaaaagagagagatgggcacatgccactgtcaatcctgctttctttccacctctgggctgagcgtaggctattctattatctcttttgttttttatttatttttatttattatttatttatttttgagacggagtctcactctgtcgcccaggctggagtgcagtggcacgatctcaactcactgcaacttctgcctcccgggttcaagcagttctccctgcctcagcttcctgagtagctgggattacaggtggctgacaccatgcctggctaatttttgtattttttagtagagacagagttttgccttgttggccaggctgatctcaaactcctgacctcaggtgatccgcctgccttggcctcccagagtgctggggttataggcgtgagccaccgcgcccggccttgtctcatcttttggccattccagcttaagatagatcgtagttagagtaacagcctctcttaggtcatcactcatctaccactgggcccccagttttggtggcttgcatattcctctgaggacatcgggttgcattgggttacaaagcaggaggtaagctgtggcagctctgggcctggcaggactggtgccacagtgccctcctgctcttgtccctcagaagcaggcctgtccctggtccttccctgtaccccaaggtcatcatgtcagaattggtggcttatgtactcttcagagattagaggaagaattagcacacctgctttattttatccaatgagacaagtgtagtaatggtagaagttgaaatactggtcagggcatagtgaccaaaatttggttaccagtacgttttagaccaaacayttactaattcagttctaaaagtaattaagaagaattttgtttctctttttcaagaagaggaaattctaacagcattctgcaggatgattgccagctcacaggctgtgcataagacctgtctgcccttggcctaactaacctttaagaaccatctcatgtagaaatgtctattatttttatcataggatgtttytgtgaatgtgtgccatttggttctgtgattcaggagaatccagccagttgattaaatccagagataacttttgaagatgaaggagaggtggtgagaagggggtcccttgggtttggtgctggaattggccttcagcaatttacaaaggccaggaactgtgccagggactatacatagtctctgtggcaatataaaatggggatgaggaagaaggaaaagtgaactgatctttctcgaacatctcttacttgccacggagtctgctaattaattcacttaatcctgcagatgggtagctgccagatagactgtgcctgagggactcaggaatcatctggacttagacccctgttagcagatctcagcgaagtggctctcctctcagtacacacagtggtcaggagacttggcgtggagtcaggcggcctgcgttcattccccagggcctcccctaactggctccgtcacctctgtctgtaaagtggggatagtaatggtaatgcctgcctcttgggcttatgagctttagaagggtccacacaagtgctcagaayacttccctrtacacagtgagcatttattagatgttacccactgatattcatyattatttgtccctagactttttccctggctgctagmgtggaaaggagagaaattgaaggcatttgttcmggctgtgaaatgcagagatcttcggcagaaactccaggtgctctcttccagtctgggctttctgggttaatttctcactggagacccaagccctcacctgagccatataaagttacccctgtatcctccatgacaccgttgtgttctgcctcagggcctctatgtgtctgtgtcccgggcttgggatgcctccccttgctcacctggcgagctcctgctgaaatgttcacacagagtctaagcgttgcctcctgagtgacccctcctgggccttttctctgcctcacactcctgggagagttaatccctccatcttttgtgccatgactcctgcacctgatgctcgccacatttagctatctgtttacatgtcagtttccttactagactctaacttcttgagggtggggccatgactttgccattttggtagcaacagagcatggcttggcattcatcagatgtttgaatgagtttgtgggtcccataggcaagctgggtgactgccagaggggcctctttagtttcatgccatgaccttctaggtgaaatgggaagtaattccatcaaggcttatggggatacagtgagagggtggatatgaagccccgagttggtgccccatgcagatgctggcccctccacagagtccagaatggagcaggacagaagtctgatgaactcaaaccaactttgaggccatcaccctttcccgtcttagaaaaacagcatccagaaatgataggaaatgtttggtcagggcatcttgttatcttattctaaatcttgcatcaattgttcattctccaaactcttttgaattgttttcattttgggcttaactattgcagataagctctttaaattaaaggttgtttttgcctacttgttgtttatggacaatctctgtactccaccttttttggtatgttaagcatttggaatgaaagatcctgtttaaaactccagaatggatggacttcagtcacttagcattgcatttaggtgaaaagggttttttgttatggttgtctttctcgaacttctcttacttgccaaggagtctactaattaattatatgacttaatcctgcagatgggtagctgccaaacagactgtgcctgagggacacgggaatcatctcgacttagacgcctgttaaagtggctctcctcttagtacatacagtggttaggagacctggtgtggagtcaggcggcctgcgttcattcccctgggttcggttcatttttgcttggttaagcaaaccctccgaaggcatgactttgacctgctgcagattgtcatattgtagtgtcgttttgcatacgcttttgactgtttaatagtgacaaccttgtagtcaagtggaaccctgacagaagggtgtgtgtgtgtgtgtgtgtgtgtgtgtgtgtgtgctgaatcttttgtacttcgtaagacccagaaaggcagggcagatgacaaaatttcttgaggtttagaagtctgtgaagttttctcccaaattctcaaaagggaaatttatgaagaaactttatttttaagacatctttttatatttaaagatactttgttcagaaatgtaaaaatggtcactttatttgcatgttcagaaaaaaaggtggggggaactgaactctcaaagtcagaaagcagggttcccgtcccacctccctcgtgagctatcagtgtggcactgggcttcattcctctgcgtcccattttctctgtctgaaaatttargatgttgagtctctgaaggtcctttgcacctctaagcctctgggatttttcaccttcaccctaccgtttggagtcaagatctccaggtcagttgcctggttttgatgccaggctcacagaggaggtggaggrtagtgggctgtgcaggaagctgagggagttaagtattaaggctggagcttgtgttgggtcgagggggagaaatggggttggagacgcctctgggctgggtcagatcccggtgccgcgctggtgttggggtatctggtctgcgcaccgccgggtcctcccyggccaccctactgtgtggcgacggctcctccagcatgttcttcaagcctctccttttcagcttcttcatctttatttatctgctctattgatccacatcctaactattctaaaggggctgaggttattttttaatagctcccgcttttccagactctgctgtgttcaggcaacaattcggatgccccttcatgttcctcttgttgcttgctgcatgtcaaaccctgattggtaggaagcttctygaggctcggactgtgtattygtgagtttcagatgcttctgcatgtttacacaggtcacttttcttgactaaatgattgatgtagtaattaggattaggctcaggagatcctctaataactggcttaagcrggacaggagtttatttgccctaaagaagtgatctttgccaccagagctgtgtgataactgcatcccgctcccttctcggcctgtcctggggacagcctcatcctggtgctcggaggcrgtatctcaactccaggcagcaggatgaaggaagacagggcacagaggatccaccactccagaaggaagacttctggaagattcttccattccatgagccagagtttaaccacatgagatatgtagctgcaaggaggctgggaagtatctgtaacatctttctttgttggccattcccagctcagagttttaagtattagggaggaaaggagaaacagacattggagcaatgaacaattccacccccgtccccctcacctgatttgttcagcgaagggtacctcctgtgctgcacaggtgttgacgctctcttcgagaagttccagaggcatttgatttagctgcagaaattctccaccgtaggtttttgaggagggtacaagaaatggtcaaaacagtacttgaggatgagatcccagcagcaatatatgcaagggacaaaagtggggtaaggattggagtgaggaagaccagctggcggctgcagccagaggccctccctggtttcctttacaggaacggaagcctctgctgtcaattgagccagactattaacctttgactttgagattttataacttgtttctgcaaggccactaaaatgtagcaaatttaggagttaagggcaacgttagacaaaaatattattctgtatcaagcttaagacaatctcatttgacctagttatttgaagaatatagctggcaaagacaattccaaaaatatagtgtatacccatttttactttctgggtagagtatctaaggaactataaaatggccctagaaacaacaggaatgaagaatgggcctggtaattgttttcacccagtgaccagcttctgaataagtaacagttatagactgcaaatttaaacctagagtgactgattttacccacagcattttctttctccttacgattattgccttcacactaagaatttattatttattgaaatcatctgtatcaagtagcatcaaatttattttatyttgccagtttttatagatccacttttagtgtayactcttaagtagaaaatagaattttcttgcagttttaaaaatcctttatactgtggaatctctaataatacatttatttagcatttctctttggcctcattctaaaaagaagtggaaacatcgctcgttgtgtatattttctcatttttggcctcaacatacaaacccatcccaagatcatgtctttattgattgtacttattttacagctgactgtgacatattcgcactattgtgctattataaatcaccttctgctattttactctgctattcattttttcttgtatgggaaagtggactccttattttcatttcagccacgtgtgcactctctcgctgttacttattactgaagtagggagcatttgggaactggagaatggcgtgcaaatgaagaaggccttctagggattggctgtgccatgtgaacagtcctgggcrtgccatccrtggagcatgccaatattgcccagaagttttgggtcagcttcttttttgtgtgaccttggtggaaaccactgagctccatggtattaagtgggccacgtgtcttctcagcgaggttcttaygtaggtatgaaggaaggaagcctgttgtgatccccrggggagctgtgagtgtagagctggcyctgaaagccttggcatctctcctgcaggaagaatcccaggagcaggtgaatcccacctgcattgagcattttttcagtttaaagcaaatccttactgctagagtatatttagaaagaggcagggccagggccgtggctaggccagcttcgtaggtgatgagctctgtgttggccatcagccttaagtgtgttgatttttcacagcaggtcactcagcagtgtttatctgaaaatactggcttggtgctattaattaaggatgaaatgaaaagcttgtttctgtgttagcattgtctaaaggactgtaaatagtgcttaattcattatggatatttggtgcccagtgaagaataatttaccaagtttgtaagaacagtattttcttcctttttaaactcttttatttcttaggaaaccagggctgtacctcttagatcattgaatagtgcagaggtgcaggaagtgccgtttattgggatgactggtgttgggcagaggggtgaccttaccctccagtcrgtcactcagcacacaggggcttcttcccttgactgtcttcctagcaaagatgacctcgtctttccttgaagatattgataccattcagctaacacttcattttctgccatatttgtgttcctttcatttttgtgtgtacgtatttggtggaccgttgaccttgataaatcctcagctttacaagtacaattacaactgtgtttctcacattacatgaagtgtaactgaaaaggttcagacarcagatttttaatgatagtaaaaacaaggactaaagccataaaacactcttgttttgttttgttttgtttttgcaatggagtctcgcttttgtcgcccaggctggagtgcagtggcgtgatctcagctcactgcaacctctgcctcccgggttcaagcaattctcctgcctcagcctcccaagtagctgaggatacaggcgcccaccactacacctggctaatatttttgtatttttagtagagacgggggtttcaccatgttggccaggctggtcttgaactcctgacctcaggtgatctgcccacctcggcctcccaaagtactgggattacaggcgtgaggcactgtgcccggccgccataaaactcttaatttatattaaattagtgtaaataagagaaactctgcttgcaagtgttctttgccttgtcattatccagacaggaacttcttcactttacctcttgttagaaataccagaattgttagaaatagataattggtaccacgaggaaccgtcagcgtggagacaaaagatctctcagcaaagcaatctttactttctgcagaaagggtgctcaatggcagatggaacaatgacgagagcacacctgaacaaaggaaaagcagacatatttatcccttacacatttgggtcrtccttactgctgtgtcctgcatccattggctggagcaggaccacacactcttaaactgatacccagtttgctaatcgcctaaaactttcctaaataggtaagtgcaaagaagaacaaaaaagttgcttaggaaaggtttaaggaagcaataacaattccaaatgagaaaggggcataggctgtgagctggaacgtgtctgtgagcatgtccaacagttacataggatagggcttagcaaagagttattagcacaaagcaaggaggcttgaagaaagttagtctttaaaataatcttttatttctaacacttatgatttattctttaacaagaaggggagctttaaagaggaaactttttactttctacatctctttatgccttagggttggcaagatggtgaaacaggtcaggcttgatcctaaaacctgccacagagtcataggagactcatttggtccttggccatcttcagcttttatgttggcctctccttgcatgagtcagttgacagtagcgtattatgccagagtagttttgtttgtggcaaactcttgttctggagatagtttgcacacaaggtaactacagttaatgttaatgtattgtgtagttgaagattgctgggaaaatacatcttaagtgatctcaccgcacacacagacacacacacacacacacacacacgataagtacatgaggtgatggatatggtgattagcttgattgaatcatttcacaatgtatatgtgtatcaaagcatcacactggattccttacagataaacaatttttatttcttaagtataccttgatwaatctggggaacatttttaaaaattaaaaaagataaggtgagartcatcaaactgcactgtgggatgagggctggagagtcagagaggtacccgtggtagctatggggctcgttcattcctgccctcagggaaagtcactcaaatccacacttcagtgatatctcagctgctgtgagtttaggacccaytgggtcatctgtagacagtcagaactacgaggctgtctcagggaaggccagaagtctcttctgtgctatttctttatccccaaatgaactgtatgcttcttcaagattrgatcacattgatttctcatgtacttttttctgtcccacacaatgccttgcacatagtagacagtaaaatattttgatgaactgaatcagacagcagttaagtacaaaatcatgtgatctgaatgggaagaactgttagagctcmggaaaagtagagtgctatgaactggaggagttggaaygagagggaaagttcccatcagccactgaactggttatatataatagttacaaaaccaatgtgtaagaatgatctgtgcttatctcatttatttatctaatgaatacttatggstattgaactaagagttagagaaacagtgatgaacgagacagatccatgaatcttagaaacaaattgatatgaaatgtcgctgtcactaggtgtgctccagggagtcctctaggacctccctcgataccaaaccccgaaggtgctcaagtccctgatgtagaaggatgtagtatttgcatataacctatatgcatcctcctgaatattttaaatctagattacttataatacctaatgtaaatgttagataagcagttatactgtatagtttagaaaatattgacaagaaaagaagcctgctcatgttcagtacagaagcagttttttttcctggatattttccatccatggttggttgaatctatgggtaaggaacccatggatatgagagctgacaataattgtaggtagtgacaagtactgagagggaaatacagcagtaaaggataaaggcaatagtgtggggacacaggcagcctgctttcattaattatttaacttaatgaatgatggggtcttgctctgttgcctaggctggagtgcactgatgcagtcatagctcactgcracattgaacttcttgcctcaagcaatccgcccacattggtctcccaaagtgttgggattacaggcgtcagccaccacacccaggcaggctgctttagatggggaaatcaggggagggctctgaggtgttaaygtttgagcagagcataagtgaggtgatggatgaaatcttgtaaaggtctgggacaccagcatcccaagcagaaggcagatgttgggttctgagatggggaccgagtgtggccagcttgagggcctgccagaggctgtgcggccatgaccatgagcaagggccttgtaggacatggcaaatactggatgtttgttaacagcagtgggaaygtgttactgttagaatatcactgaaggcatctgtttcatctctgaaactcccctactttatcttctacctctgcatcaccattactgccacccctctagactacgcmagcatgatcctttcccagggtaccataatcagcttctaaaagtcttcatggcatggcgatctcaggggaactgatgctagggaggatgggagaccagctcagtgacaattgctgttgtccctgggtggtagcaggggaagtggtgagaggtggttagattctcagtctgttttgaaggttgccaactggattggctgatggaatagatgaagaaagaaagaggaataaaacttgactcctaggcttttggctgcagcaactgggtgtgtggtggcagcatttcccatgaatgaaagactggaaggagtgtattttgggggggaaagtgagacatgccatttggtcctgttacgctggagtgtgcrttagctatggagtggaagtactgagtagctgctgtgtgtgggagggacctggggctcttccactgctttccttggctgacagatgattctctaagtggggagacttgataagatcatcaggagagccarcgcagatggaggaggggtgaggaccaggractgagccccagggtgctcctgtgtttagacacgtagacgatcaggagactgtggtggccgagaaggttggatgaacacaagcgcagcctgttmccctggaagtcaaataaagaaggcaattcaaggagaagagaaccactgtgcaaaattctgctgcgaacttttatgtgtgagctgtataaagccatggagcracaggagctgggagccgacattactgtttacaatgcaggggtgtactgtgtcttcctgaaagtcacttagtattgggtaggggtgtggcagttaatgtcttctgaatttagactgtgccgaccttcaatcttttaaagcatatttcctgtttattttcccatagctaacctttatagatgcaaaaagcaaaagccatttccagttattgtattggtattccctgggttgtatctggggattctcatatgctgtcgagaacaaggtatatttgggtaacttacaaagtggagatttcgcaaaagcmtgtgggaggcattaggagctacaagatatgtgggcacgatgagtgagttccagtaagtggtttagccctaaacctggtctctctgcctgacacctgttctcagcatttggccccatcttccattcagttgtgcaaaccaaacattggctccagtggcacttcctgtctctcccaccatccttaccgtccggaagccctctcgtccactctgcctcacaccatgcacacccttgcacctgcagctgcccccaccctaccctctggagtggctgcagagaacagccttccctcaccctctcttgcccttttgtctgctgtccactctgaagcctgggttatattttaaaattaaatctgatcgcgttacctcccccacttagatccttaccatggcctctctcattgctcacaggacaaagatcagaatccttggagaggcgcaaaagcagcacacggcctggccctttctcctaccctggggccctgtgaggccttctctcccaggtcctgaattcgctgttccccgcccctgcaacaccttccccagacacctcttggcccttgttgactgcagctcccaccttgtggtacagctcagcagggcccgtcctgacccctttgtgtgggtgacattcctgtgtcatattcttcatggcactaaactctttcacctgaggacatttcctttcacttgcagtggcatggtcatagttattcatgtttcatctctccggctgtgaactccccgaggcgggagccgtcgctatcttggctccgactgtggctgccacgtggagacgttcatgtgtgtttgttgggtgaattaactcaagtgcataataacaaaaacaaatggaaatcttcctctggaaagacggaagaccrttagggtcagctcacgtggaaacagctttgcatctccatgcccatccccacttctgggtcctccttactgacccgcgacatcctctccccacctttctccctctctctgggcrctacagctggtcacttcccacacatggtcgcatgagtagaggcttagcaaggagtgcgttatggaggacagatttctgctactgacttcgccgaagtggatccacagcttccatttggctcaggctctttgggagaatttcacttcttttgttacctctaatcttacctatgtgtaaccacacattttggtctttttcttaaatcttttagataatcatcagataagtttacttacctgttattctactactttctgccttgccttttcttcaggccacccccaagtgctataacctgcccaaaggttaggacataacaccgctgccacacgtttatctctgggcataaccacgatggcataaacaccagcattcccaatttttctttgtctcttcggaatgctgacaggcaaagaagagcattttctttagtctccaaatgtgtggctcacgcctgtaatcccaacactttgtgaggccgaggcaggtggattacctgaggtcaggagttcaagaccagcctgaccaatctggtgaaatcccgtctctactaaaaatacaaaaattagccgggtgtggtggcaggagcctgtagtcccagctactccagaggctgagacaggagaattgcttgaacctgggaggcggaggttgcagtgagctgaaattgcgtcactgcactccagcctgggtgacacagcgagactccgtctcaaaaaaaaaaaaagtgatgtgtgcttattaaaattgctgcatgtatttactaacaagagtgagaagattgacaagtttcaaaacatgatttagattcagtttacttggccaagtgtctctctctctctctccgtaatacatatatttcaaggraaatattagatattacaaaaagccaccctcatcttttactgtcttatcaagatgagttattttttccaaaatatcaatttttaggatttgattttcctaccaattattaagatagacctttaggatggagtgaaaatattttagtatcagttagtttattctaagctatgttttttttttttttagttttttaaatctttaaaattttacatgagttatcagtgraaccmatataatccmagatgkttctctctctctcttttttttttttgttagaaaattgccccacaaatggtttaggcaaggtaaaaaccagaggtcgataggtagattcatacatacctatcccttgttgctgttcttggtcaaaaattaaggtgaggagttgccctgttgtacttctgtttcagattaagactgtsgaattaccccatgaaattgaatgtgtattttctccattttagcactgtaaagatcagaattctgtatctaaaaacttgtctaagtctgcaattctttataaagggccaagtccatgtttttaacctcactcgaagtygtcctttgaacatcggctgtccctggcaaataatgattgactctgggcgatttgtctccactgacatatccttaacaggaatcaaaagttacggcagctcctgagttcagcggtccctacgygagtaacagcagtctgtgagtttacatagttgtgggtcctggctgagtcattttatatctcaccatgtggcttctctctactcagtaggtgagtggaagtgtccaaccttaagcagacttttctggaatcaacaaaaccatgtttttattgctgcagccttggcgaggaatccagaagtttcgggttggctttgaggtagccattctgttgtctgcacatctaacgtgcattcccatgcctgtttaaggtggacttttaataatctaaatggccccagtagaagacatttcagtaaattggggaatgcctatacaatgtaacagcatgtagccatgtcaaagtcccgttgaggaagaatacttagtgactgacatggyttgcacctgttccctccaaacctcatgttgaaatgtggcctccagggttggaggtgggcctagcaggaatgtttaggtcatgggggcagatcccttatgaatggctttgtgtcgtcctcacagtagtgagtgacttctcactttgttagttcaggcagagttggttgtttaaagagcctgggaccacctcctctctcgccatgagatgtgtgggctcccccgggccttccactgtgcgtaaaagcttcccgaggcctcaccagaggccgagcagatgatggtgccgtgcttgtacaggctgcagaactgagagccaaagtaacccctgttttctttgtaaatgatccagtctcaggtatttcttcatagcagtacaaaacagactaacatagagacactggaaagtgtttaataaaaatgctgggtaatagttactgagcataaacgatgtgccagacacatatgttcatagatttcatcctcaaaaactacatgcgtgttttcccaagttcacagagtgagtggtaaccactaggcacctctgcctctgtaccatgtatcacctcctttttattttctaaaacaatgcataggataaccatcacagtttctatccaacattacatacacatacgtgtgtgtgtatgtctggctctctggaggcaagatgatgggtgattttaatttttttctttgtgcttcccagtttttctgcagcatagatggataaatgttataaaaagaaaaaaaaagagtggatgtccttagcactaggtatgtttagaccaagtaggaagagaaacagtttcaaatcagaataatgatccaccttcctacaatgtgatgtgccctgatgtcttcattactgggagaaattaaggactgaccacagtcgactctgcaagggagaccggtttttgtgcagttgttggacacttgcaggtgacttgctcaaggtcaggatgaatctaaaataacattcaagctcagttaaagaagtttttttttttcctacaaaagtacgtatttaggatgctttgcccaagctccrctttcttttttattactctgagagctgcttcccttgcctgagaatccccagacctccttacctctgtcctgtgactaatccccacttgtcaatcatcttggagaaaaaatttccctccctgcatcatgaccatccttgtttcacatattaaagcagctgaaagcactaaaactcttttattccacaagaggctcttcccgcctctccccagtgtggagttgaacccctgcctccgtgcctccattgtgtcctggcagcactgtgtcctggtggcagcatcttcagcaagttacttgttttgttttgtttttacctaccagaaagtgagttctgcaaaggcagggactcatctatctgacagtctgtgctgcccgtgcattgccggcacgcagggtgctttccagagggaagtgacacacgtgcctcttgtgaatcgtcatctyaggcatgccagctcttgaggccacacttagactaagatgtcagagaagtcagtctcaggtgcaggagtcaagaaaaaatagattgggtagagaataagagcaattttgagagcctgatggaaaaaccaagcagacattaccaaaggatgaaggacacgagcctcatgcttttactaagctgtatgagtgacatggggaagcaacttatgttrttagtgaaaggttctttctctctctctttttttttttttgagacagagtctcactttgttgcctaggctggagtgcagtggcgcaatctcagctcactgcaacctcggcctcctgsattcaagcgattctcaagactcagcctcctgaatagctgggactacaggtgcccgccaccacggctggctaatttttgtattttttgtagagacggggtttcgccatgtaggccagtttggtctcgaactcctaaactcaagtgatctgcctaggattacaggcgtgagctacsgtgccyggccgggaaaggttgtttttaaatttttttttacttttatctttttgagggtctcccyctgttacccaggctggagtgyagtggtgcagtcactgctcactgaagcctcagccccttgagcttgtgccatcctcccacctcagcctctcatgtakctgggactgcaggggcatgccaccgtgcccagctaattttttaaaattgtattttatagttatggggtctcacaatgttgcccaggttggctttgaacttgggcccaagtgattctgctgcctaggccyrttgtacttgcatgayggaaatggaatataaaggcctgtgttgttttaatccacatttatsgacaagttagtctcctgttgtcatctgtgtcttctgaaggagtcacctgtttggttaaataaattctggccgttttctcttaattyatttgcctgaaaaaaaaatttttrttctacctctcctttgaacagcatcctggtggggaagaagttttaagggaacaagctggaggtgacgctactgagaactttgaggatgtcgggcactctacagatgccagggaaatgtccaaaacattcatcattggggagctccatccagtaagtacattttgggggccctttcttatttgtatttaaggctatcagatgaccttaccctagtctgtaagcttgcatgtatacacattttaaaaggagtaaagcaaaaacaactcctgattttaggacaccattttttgttataaataaattgaccaaaaatgtctttgcatttcactgttgcttttttttttttttttttgagacaggtcttactctgtcacccaggctggagtgcagtggcacgatcatggctccctgcagcctcaacctcctgggctcaagccatcctcctgcctcagcctcttggtagctgggactacaggcacacacctccacgcctgataaatttcatagtttttgtagagacggggtttcacygtgttgcccaggctggtctcaaactcctggactcaagcgatccacccacctcggcctctcaaagtgttgggattacaggcgtgagcccccacacctggcctggttgcattgtttactggcacttcgttttartcagcaggctccaccccacagccatgcactggggagtctgctcagtcctagaaattccatggggcagcacgttttacaaggtggggagaatcaacccagcattgctttctttccttttctgaccaaaatatttttattaagaaccccacttctactttcattaggccaaggatattttagttctaaaaaatgatttaaaaaatataaaaayggagctatgtgaaatgaataagctctgccttctgtagaactagcacattgtccatattctactcactgtaccccagaccttcgagaatatcagctctggaccaattcattgaccaacttttggaaaacactggcctaatttggcttttcttttctttttttttttttttgagacagagtcttgctctgttgcccaggctggagtgcagtggcgcgatctcggcccactgcaacctccacctcctgggttcaagcaattctcctgcctyagcctcccaagtatctgggattacaggcacaggccaccatgcctggccaattgttttgtatttttagtagagatggggtttcgccatgttggccaggttggccttgtactcctgacctcaggtaatccacctacctaggcctcccagagtgctaggattacaggtgtgagtcaccgcacctagtcctaatttggcttttctataaacactgtgctgtgttacggttttagacccctctgtggcagttgtaaatgaccatgttaaatgttactagtctgtcaacctaagttatcaggaaaatcgctgaaaacttggaaagaagttgccgagcgctctgagcttctggagtggatcctggggccgcacactcagctgccctgtccacctctgggagtgcctggctccgtcctgccttcccacttgtggtgcatggttagcagcccgccagaaggggacaaagacctgctaggagcccgctctgctctcgtaagaaaaaaatggagaggcaaatagcctcattctaagtgagcaaactgagaaactcttaaagaatataggaaaagtcttatcgtataccactgatgatccctgtaatgactgtgaatgaagaagaggttacattaggttctttgtagaaggctcgaaagtaggaaatccatttgagaacaacttcattgagttgggaggtttgtttgattttgtttttggtggtaggagataygtactttgagggagtaagcttcattcatctgacaagtttatttgccccgatattttcatcccatacttcacaaaggcaaagtgtcttagggtcatcagggaggcctgccgttacacatgcctgatcccatccttgtttccagctgtgggtcaggtttcaggccctgactgtggcacttctgcttcacctgcccactgggcttccccctggccagcctttaaacacactgtatttttgacagcttcagcctgaagttgaaatagtttatgactctaaaactgggagactgcagggcttaactgaagatatcatacacgtaagagatacatgcacaatctcaaatggaatttgagaggacagaagggaagaatcagtcttcagctcctccctgaattacgtgtcgcaatctgagtctaataaatgtgtgtgcacatcagcatgtacagagagctgtcatgggtgctgttcgaaactttggaactctagatagaaaatatctcttggcacttaatctgctactaatttttgctgttaaatcagatggatcaaactttgtgtttaatagctaaatgttgaatctgaaatggtaattactgaattataattttaaaaagtctcaaagtcagcattttggaagtggtactttcatagatttttaaattccataatgtgscttatcttttcattgcaggatgacagaccaaagttaaacaagcctccrgtaagtgtgaccatctcaagtatctctggatgttctcgttgtatttaatacttgtcaaactgaaggcagagggtttttatttacctgactgatgccagcacaggtctttctagataaatgaatatgtaacctactggctcagcaagtattttttatttacggraacctgtcagtatgatttgttaggatggcgtgtgtgtaatttttttaaggctgtcagtaaactacttttttcatcataattatcaatatataccrtttgaagagctactttttatggtagcacgtgcttctgatctaaaagatttgacacaagccttattttcagagaacttaaaatctgaatggatagtggttttattacttaaatctttaaggrtgtgtctcatgtcttcttcatctttaagtctcttgggcatagtaggtgttcaataaatacttgtcagatgaatttaatgaaattaaataatacccttttgacttacttttccttgggaaaggaaaataactctggcaatactagttttatgttctgattcactagsctttctctctgaactgacyatctcacttatatttgaagataaatgtagggtgagaatggaagagcacagcctaagttcctgaaaagtacaagtaggcaaaatagtttctagtgtctaattaaaggactacaggggaaagttttgcttaaatcaaatgacaaaaaagaaagtataatttttcgttttggtgtaaattcttggtttcattagagaaagtgcaacagcaagaccccactgagcttgtgtcgagaactggtgagctgattttttgagctgttgctgccaagacatcrtctttaatctacaaaaggatcaaagcagttaatccaataatataagcataaaggccacatttacctcaayatccctgatagtacaataaaagtcttgtgtaatactrtttagtacaaagcaattttttttatattctctccttattcaagaaagacttaagttcaatgtgaatgatatgagtacttccaggagataaaaagttgacttcagaatttcaatggcctctgtgacaattgcttagaatccttgctgtgagttcatttgactttagcatcttttttgaggctactttttggacagctgaaattctgtgwtgcataaagtttttcctttttctctgaagtctcttaagggaagaatatatattttttttatcatgtgttcagcatgttaatcattttggtataagtcatttagctatagcaaaacaaaggtttaagattcattagatgaacttagatgaccgcagggccagccgtctcgctaaccataaagactacaagcagaaaacacttgtrggtgtaagattgtacaygtgtctcctgccataactactttcagtttaaaggacaaagactttcttccttatttgcttttagaacacgtgtattacagcctatactctgttggattaattgcccattactatttattgttcttattttctattttaaagtggcagttactttgatactgagaatattttggraacagagcaagtttatgtggtaaattctgggactttagcttttagtatcaaagaaagctttcctgacaacattgaggcacagccctttgtgcgttaagacatggcttacttcattccagcattagcagttgatacttgatcagcttgttagaygtagaaggtctcactgaagtttgagaatcacactaactttttaaagtagatttttgtttgtttgtttttgagacggaattttgctcttgtcacccaggctggagtgcaatggcgtgatctcggctcactgcaacatccacctgctgggttcaagcaattctcctgcctcagcctcccgagtagctgggattacaggtgcctgccaccatgcccagctaatttttgtatttttagtagagatggggtttcaccattgttggccaggcttgtcttgaactcctgacctcaggcattcgcctgcttcagcctcccaaaatgccgagattacaggtgtgagccacggcacccmgcctaaagtagatgtttttactctcttcagagaytttacagattaactaacttctgagtattttttaaacaactcttctttattgtgactttgcttcagtgagagcagaaccggaagaatgtgggacaagaacttgctggcctttttgagaggccataagcagatgaaatgaaaggaaatacatgagcatttttctggatgtatctttcttgtgcttttggtttagtggaagtaaagagtgtccttagggatttcttttgtcatgtgtctgtataaccatcggccgatctccaggttgaagaatgtacactgtggtctaaagttttgagatgttgcctgcttaaaatatctagttgaatagtgaaataaaatgcagtaaagattattagcttgaacctgccctaaggaaagcatagtgttaagttaccaaattaagatatttgtagacttagaaatcatgcattttaatctaacataaatgtttctatcacatttgcttacatagagaatattagtcgtagcaataccccttsttggttatagttttgaaagcattcttgtagaagttatttggtcctcacagtgtctccatgttagacctgccaagggaggtaggtacattgcagctgggaagtgttaagcacccggctcacagacgtgctccagaaccatctagcacccatctcaggctggtcagttgcagtcccttaagcttctcctctaggttctgggcttgccgtgttagacatcactctgtcagtattttaagggagataggcttcccactaaagtttacgttagatgaacttataaatgagatgactctgattcacaaaagcttgttgggctttgcatgcttttcataatttatggagcttactgtaatttacactgattcacatgacttttataagtcattatgcatgacatacttattttacttttttgagacggggtctcactctgttgcccaggctgcaatgcagyggcatggatctggactcactgcaccatccacctcccggggtcaagcaatcctcccacctcagcctcccgagtagctggaccataggcacacagcactgtgcccagctaatttttgtatttttctgtagagacagggtttcaccatgttgcccagactggtctcgaactgctggactcaagcaacccgccaatctcggcctcccaaagtgctgggattacaggcctgagccaccatgcccagactttgacacactgatttaattgttaacctctttttactgaagttgaacctcraagtcatggagtgaacaggtggcagagccaatcataaaaaccatattctttctccttgttcwttgctgacattctttgatagtcacgtccctaaacccaagtgaggccctcagagcactgaccactaaagaccaattacttttccrtcaaagtgcaaagtggtaattcaaacttcctttaactgtcaagcatcctgggctacagagccaagaagataatcaacaatcaaaaggtgatacgattatttcaagttcccctctttagagttcatggctgttgctgatgatgctggtgccagagtagtgttttaaccttagcgctctcccatggtaaccacaaaggcagcaggagggcaggtgggaggttccagagttgtcagcaygttggtgaaatgcctgccctcattttaacgacgccgtggatgtttgtgtttgccttccgttggctgtttcaaacttaactttctagtttgacaatcatattttaccttcagtgattcttttgtttcagaactgattgtgtcctctaatagctaactaatatttttgtatattttgattatttctagtaatttttgttaattttattcatatatacacaatttggaaaatcctcttgctgtagttatgaatactttttatagatgctaagattttaaaattgctggaatagataataaatttgcaattttatttttaaatgacttaccttttttcccctactgtgtcaggaaccttaaaggcggtgtttcaaggtwggtgggtctcataactgctttgcttgcttttccctgaaaggggtctgtcttttcacgggagtttctctaacgtgctttgcagagtgatgcttgccttactgcaggccgctgattgttttgctaatgctttttatctttgctttgggaaactgcagatctgaagctgtcttatttatggcaacttctgtttgaggccctaatgcttatgttggtgtggaacatcaaaagaatgcttcttaacccattttcaagccccaaaaagttgatatttcactagaccttagcttttcagctgttggagaagtatgcgtttttccagaaccattgtccattcactttagtgctactcaaaagagctgctcccagaaagctctggaggataaaaacagggcttccttatctggggatttgctgttaggctgacagtgaccagctggtgacaagtgtgacgccgggcacagcagtcctgtgaggctggtctggtgtcttgctggttccgtctggtcagaattaaagcagccccccgggaaagttggcctagaatgtagaacttaaaatggcagtcctcttttttctttttggttcacatatatttaatgtaatttaggtacacttttttacatctgtcagatttgaatgaaataactgatgtttttattgaacattgtgttcatgcttttgaagaattaaactgctttttctaaaggtgacgtgggattgtgtgtatgtgaacatgaatgtctgttttcagtttctgcattatttagatgcctagcgtgtgcaagatattttatgtagcatattaattttgaatgtttttaaattattgaggttatgtccttaagtaaatataatgattaaaatgttttactctggaagaaaacaaagttaggcattttagtgaaaagaagtttataattttccctttcracatcttctgaagaatgcattgcataaaatattgtgttcttattttcaaacaggattttagtcaatgaaataagttcagcattcccttgaacttactttactttttcctctcgtgtttcaggaaactcttatcactactattgattctagttccaggtatgtggtagctttcttttaaagcagtagtgggtgggagggctcatgggtccaggttggacaaggtgcgtcccccaccttctgggttcctgggcctgacactgtgctgtctcagcaaccttctgctgaaggccagactgttcagagcactcagcctcaaactttcaggtagccgactgtgaacacygtccacagccacgtgatctagctggctggctgcatccaccccaaggaacaaacagaacaattgcatttccttttcccccagggcagcatcttaggcggccagtcccacagcacctccctggctcatccaagcagacatttccttcctttcaatccatgtctgtttcttaaactctagtgattacatttccctaaacatgggtcagttttcctttgtcatttttattagctttaaagttgaagctggtaatctatgtgtagcacgactcaattgttctaggcaccagatttgtttatgatagtccaagtgcacattaacatctttggcagctctaccatattgacttcagtagtagccacttttttggacccaagctcaaaaccacacatttgtatttcatcctgtcaaatttaactgcctcagtccgttggtgttctggaatattccctgcctgcaggcagtatttcaccttactcttcattaacaagccagtttctttctaaagtgaaattgaaaaaccccaccaaaccccactaagacaaaagttacacttgtaattcttatgaaagtttcacttgtaatccttatgaaaggattatacttgtagtccctatgaaacacatatgtataccaagtctatttctaaagcctacacattaatttccatttttctaagaaattaagtcaaagatcaaaatctaaagattcaaatctaatttaaagattcaaatagaggccaggcgcggtggctcacgcctgtaatcccagcactttgggaggccgaggcaggtggatcacgaggtcaggagatcgagaccatcctggctaacacagtgaaaccctgtctctactaaaaatacaaaaaaattagccgggcatggtggcgggcgcctgtagttccagctactcgggaggctgaggcaggagaatggtgtgaacccaggaggcggagcttgcagtgagccaagatcgtgccactgcactccagcctgagcaacagagcaagactctgtatcaaaaaaaaaaaaaagattcaaatagaaattatagctcatccctcctttgtccctgatttgatttgtaatctgtaatttatagatcgaaattctatgcatcaggactgtaaatttaggcttttttttttttttttttggtgaatttagacctgtggaccacacaccaagtagtctggccattctgtttcttaaccctttaaatccacttcagcacaggtagtaaagattagattttccaaacctaagcttaaagctgtggtgttaatggcagtgttaatcatcacagggcccatactcttcaactttacagctggtggggcattcattttttggtttgtttatttttgttagtttgtttttgagacagtctcgctctatcacacaggctggagtgcagtggcgtgatctcggctcactgcaacctctgcctcccaggttcaagcgattctcctgccccagcctcccaagtagctgggattacaattagctactgccaccacgcccagctactttttgtattttttggtagaaggtttttactatgttggccaggctggtctcaaacttctgacctcaagtgatccgtctgccttggcctcccaaagtgctgggattacaggcgtgagccactgagcccagccaagtggggcatgagttttctcataaagccagcagggcagagtgattcctagtatagcagggcatgtgttacactcatgtcacttttagcaaatccacgttgccttttcagcaaaattcattacagagttaagaaaaacatgccctggtaattttctgttagaaggrgcaaagattttgagtccaccacagtgcacatcatgtcagcatcattgctttttgtgtctttctagttggtggaccaactgggtgatccctgccatctctgcagtggccgtygccttgatgtatcgcctatamatggcagaggactgaacacctcctcagaagtcagcgcaggaagagcctgctttggacacgggagaaaagaagccattgctaactacttcaactgacagaaaccttcacttgaaaacaatgattttaatatatctctttctttttcttccgacattagaaacaaaacaaaaagaactgtcctttctgcgctcaaatttttcgagtgtgcctttttattcatctactttwttttgatgtttccttaatgtgtaatttacttattataagcatgatcttttaaaaatatatttggcttttaaagtatgcaccgtgtttgcctgtttggtgtataattgtctttaatgtttagaatctggttatttagaggattccttcaatgtgttactcatccagacccacagaggccatatgactggaggtgcgggaaataggtttgagtgtctcctttcacatcgtcacatctcrttgagtaaccatgtattgtatgcttccgatatagtttctttttttcaaggaaattaagaaaggccagaaattatagtttaaggatttctaataattgtcctacttgaaatagatcttaaaaagaaagtagcggctgggcatcgtggctcacacctgtaagcccagcactttgggaggctgaggtgggtggatcacttgaggtcaggagttcaagaccagcctgaccaacatggtgaaaccctgtctctactaaaaatacaaaattagcagggcgtagtggcgcatgcctgtaatcccggctacttgggaggctgaggcaggagaattgcttgaacccaggaggcagaggttgtagtgagctgagatcgcgccgttgaactccagctgggcaacaagagtgaaactctgtctcaaaaaaaaaagaaagtagcctacagggcctataagagagacttcttatcttcactgattgaaaaacatcagcaacttaaaaacacatgaaccatgagagggcatcgcaactgtccattctctcagcttacacgtatcattgcaaaggcactcacagcttcataggttctaaagttttaagaattcctcattcagagagtagaattgtttgtaaactcttctaaggaaaggctggttttctaatttgtaaggagattgtgggacattggaatctgatctttgaagaaatttagcggctagtgtcaagctctgaagagttctggtgtggctctgtctcctcctgggggctctaaggggctgattcagtcatcttacttcccatttattattctctgccttatgtgttattcttttaaatgtggaaacttgaaagctgaatttgttagaacccagtacatgtgtcattggctgtgactgcatttgcactggcatgagctgacaaaccacgaggttcttcagaagtgaccgcgtgcagtggaaaggaattgtgttgttcttacagagtacaacctttataatcaaataggatgcaccgcctttgccttctttagtcactgaaagttgacaagtagtttctatttcaaaataaattacaacacttgttaagggacctatgtaaatatttcaatatttttggttgtgatttttagctataaagcttcacattttagtagtttttaaaacattgctcctaaatcaactatgaagtgaatcgaagtgggtcagtcgtaccttagatgacattaaagggttaacttgtaaatcatttttaagatgttgagtaatagcatctgtatatcgttaagaaacataacagttgaactttgacatttttatcagtgactcagcaatttgctgctgtggctggcaatgtttcttcatgtgttttgggaacaacatgtggagtaaaggagagtttacttcctaattttaacatttacagtttgtgcagccagactctcaaggaaagatatttgacacttttttctctattgctttcccttcagagaggtgagagacttcagaggctgccctttcttttcatctgctgcttgtgaaaggaaaacatcttgggcccccagaatcactaaggaaaactcaagctggaaactgcttagggccaacctgcctcccattctactcagtcaagcctctgctcactgagagagaggcatatctgattgcttcctttggaaaggctaatcagaaactcagaagaatgcaaccctttgtgtctcacctctctgtgacctggaagctccctcctgctttgagtcttcctgcctttgcttcaaggtgtcccgcctttccaaacagaaccaatgtacttcttacatatattgatcaatgtctcatgtctccctaaaatgcataaaaccaagctgtgccctgaccaccttgggtacatgtcattaggacctcctgatgctttgtcacgggcatgtcctcaaccttggcaaagtaaactttcttttttttttttttttgtttttgagacagagtctcactctgtcgcccaggctggagtgcagtggtatgatcttggctcactgcaacctccgactcccaggttcaagtgattctcctgccccagcctcctgagtagctgggactacaggcgtatgccaccatgcctagctaatttttttgtatttttagtagagacgggatttcaccatgttagccaggctggtcttgaactcctgacctcaggcaatccacccgcctcaggctcgcaaagtgctggaattacaggcatgagccactgtgccgggcctattccttgactttcttaataaagttgttttcactttgcactgcggacttgccctgaattctttcatgtgcgaggtccaagaaccctctcctggggtctggattgggacccctttcctgtaacacagggactgtattgggtgcacgtgtgtcagttgctcacctcctgggtttgagttgatgattagggctctggttggaacaggcatctcccttcctctggaggtgtctagatgaaggcaagtggaagttctggaagcagattctcctttgcagcgtagcctttctgagaggtgtgcagacacagatggcgtccggatcctcagcttctacctagattgtgggagtttccctaggctgctgtaaccaagtacaccacaactgggtggcttagaacgacagaaatgtgttctcataatttagaggccagacgttgtaaatgaaggtttcagctgggccactcgccctccgacactctgggtggaatccttcctcacctcttccagctgccactggtggccagcagtcctcacctggcggtcctcacctgacagtcctcacctggcggtcctcacctgacagtcctcacctggtggtcctcacttcacagtcctcacctcatagtcctcgcctggtggtcctcgatgtggtcctcacctggcggtccccaccttgtagtcctcacctcgcagtccttggcttccggctgcgtcacccagggctctgcctctattgtcactgacatttttctccctttgtgtctctgtcataaggacacattggattacctaccccagcatgacttcatcttaactaattacatcttcatgatcctgtttccaaatagtcacactgaggtgctggggttaggacttcaacatatgtttttgggggacgtaggtcaacccacagcacattcttttctcaaagtgacctgatgtttatgcctgcgcttcttcctttactctctttcaactcaattcctcttctcccacttttcaggaaagaggcgatcttagctcaggccactgcaacaaaataccttggactgggtggcttaaaaagcaaacatttgcttctcacagttctagaggctggaagtccaagattaaggtgccagcagattcggcgtactcacatggtagggagaggaagcaagctgtctcgggactcttatgatgacacgatactaccccacctcctcatacctgcacattaggggacagggtttccatatgggaatttgggggagacattccatctgtgacagagacctatttctcacccatcctgaattttaatattggatgtgaaagctactgtcaaacatggtacatagtggggtcgtgagtctctgtaatagagacacttctttaatcaaggtaccccaccccaagtcaggctttgtgctttccttgtctggcgtgtgctctgctgacggtgaatcatagagtaggaacggggcgatttagccttctggagggtggttggagttcacatggacagtcagcagcaggggtgatgacattgcattgagcaatatctgttctaccatgctttcactgtctttgatgaaggcctccctccctcaggagtgccctgggagactggtcagatacatgaaatcatcttgtgatatgggtccacagaaaatcaaaatcaaatgtttaatttcactggtatgtgtacatttccattatagacaatgtgattgggaggcaaaagactgtcataatatttttcattaggataaaactggggagaagaaatagacctatgaggtcaaggagaaaaaggaacaatgtacaatttctttctactaagagtgtttctgcatctattacaaaagggtaatggcaaattgcattgatatttaaattccacttagcaaattttaaagagtgatatttcagctttattttaaaatgtcaatatttcaaatgttgcataacgatgccctttgtaaatatttaaactcattatgaaaattttaaagggcaactgaaggtgtttttcaacattcttgtaagggtaatttaagtagaatatgtgaagagcactagctcgtggcaggagcttgttctgactggctgcctctgcccgccaccgcctcacacacctgtccccacatcctttctccatggcctggccacactgtgaaatcacaacataagtttcaagcattgatagtgtatattgagtgaggttatgcactacacacttaattttgacatcagcctgcctgaatgtttttcttgcaaaatatttaaaaaattgctttttatttgttagctcatcagtccaaggcctcagcacatagcctggctcacagaaacattcaaggttttgagttgaaactaaattgtgaattgttttcatattttccgtggcttctaagtctttgatttgattttttaagactctgtactcctaactgtaagttggaatgactaaatctgaaagtattgttttaaaataaaggtaaggcatctttgatactataaagcagggacagaatgaaaaacaccttctctytccggaagacatctgttgtactgaaaatctgaagtcactcttgggcagaaaggaaggcttgggaggcttggagaccgcggttggaaacctggccctcctgcttgctagctgcatcgttttgagtaaattacttatccttgcggaatcttactttcctattgatataattcatgagcaacgcttcccttaggcctcgactagaggtcctgcccactcggaggaccccgtctggtccactggctgtgggcttccccatgggccaaggatgtgcccacctggagcctgtacccctccaaaccctagtacccccacacacagcccaatcctgcctgtaggtctgggtctccccagctcatcctcctgagggtcaccaggctctggggggtgcacatcagggccgaaagagtagccgagggctggtggtcttcagagagttggacaccctggatgagcaggtggggtctgcaggtagggtcttcctgagtgcacttggaccctgcatgtgagtggactggcgctgagaagggaagcggggagctgggagctgactcttccaatgccaccaccatctggcacagaactttgatgaatctgaaaatcctaacttcaaaagtgacctttctggccatttgtcaaggcaggtggatggggtatattttaagacttgtcagtggctgcacaacattaaaacactcggacacacgatgtgtgctcctcctgccccacagatgtaaggggatggtggctcctcagcgggtgaggattgaaatgaccacagagcagccgtccactgctggcccatgtgtctaattcgtgtttgcactttcccatccggacctcttaaagattgctttatgttaagatgaggtgtttggtgtataaaatttgagcaaaacaaagctgattgcagtaattgcagctaataatcacatccatgtatagaaatccctagaaggccaggctggcccagtatataaagctcccctttctctctcctgtgatcactgttgtccactctgtcaccttatctgaaggcaccatttggtttggctccacatcag

SEQ ID NO: 94030 - DNA, 14375 bp, Homo sapiens
cacattgaagatatgggagtgtttcttcaccacaaaagaattcccttgggtgacccatattatcacacccaccccatgtctcttcccaaacccttctaaccactaatctattcttcacctctataattttgtcatttcaaaactgttacaaacatgaaatcatacaacaattaatcttttgagtctggctttttcactcagcataatgtcctcaaccgacccaagttggtgcaggtattagtaatttgttgttgatttttttcatggttgagtagtatttctttgttctgatgctttgtttcactattcataagtggaaggccattgcatttttgtctaatatgtcttttatatataaagctgctataaacatatgtgtatagattttttaatgaatatagttttctagtctctaggataaatttcataattgaattgctgagttgtatgtcaaatattctatgtttaattttttttaatgcaagagtttttcagagtagctctaccattttactctctcactggcagggtataaaacatccaatttctccaaatcgtgaccaatatttgaaactatcaatattttgtattttagccatattaaaaggtgtgtagtagtatctctttgtgttattaatttgtattttcctaaaggttactgatgttgaacatcattttatgcctttatttgccatgcatatatctccttggtgaagcatctgtcttttgccttggttgaatccagctctcctattaactccatatctcttctcacagatctgagtgtggctggagaacaacacactaccatgcctaatggtttcacttcacatttatgaccttgagcctcaaatattcacttgtatctcctgaacaatcatgtaacatttccataattgcttcccactctccaaggaaactcttcacaccacctcctctctcctgaaaccacctcctcactcttttatcgctctcttgtgatgctctgccgagaattaccccatctcccccacaacaaacctacctgtcagttcgcctctgagctcatttctctgagctcatttctctgtcttccctcccaagtcaggcaatgggctctgcacgctcctgtccttaaccgtcctttccccttgtgtgctggttccccttcctgccctgaaacactgtgtataatgaccacctctccctccagcttcttcaatgcttcctcttctattgggtcattcagcacagtataaataagctatcctatctccttaaaacaccactcaagtcaacatttccctccatccacaatctgatttctcttttttcctttagagaaaatcacttcagaagagttttctacactccttatcttcattttctcacctccaattaactctctctctccccctccctttcccacctaattaaccttttcattatctctttatgtgtgttcttctcatattcctatttcactttcttagctaaatcattgcatttatcactgtacatttatttcctttattttaaaatttatttttaaaataaaatttgaaatatttttttaaaaatttctttttaaaatagtaatatagtcacaggtttcaaaaaattttttcacgcatacgttgaaaatggtcattctcattccaagtactcgggcttctttaccgtattatcaaagacatatacatttttatagtttttaatttttaatctatctaaagacacttaatgctaaaacaactatatacttgtttatatatttatatgtatatatataatatatatatatatatatatatagtctatctcatacaaaatacacattggcctgcattcttttttctttatttgatgtatcatgaagcccctttcatatcaggtttcttgtttttttattttatttcatttactcagacagcatctcactctgtcaccctagctagagtgcagtagcccaataacggctcactgcagcctcaaactcctgggcttaagcaatcctcccgcgtcagcctatcaagtagctgaaactacaggtgcaagccaccatgcctagctaatattttcatttttgtagagaagggttctctctatgatgcccaggctagtctcgaactcctgggtgcaaatgatcctcccacctcggcctcccaaagtgctggaattacaggtgtgaaacaacatgcccagcctgttgttcttttgatactgtcgcagagtattctactatacgaatagaccataatttatacagtattgatggccattttggctgttaccattttttattgcaaaaatgctgcatttattaactttgtgtgtgtatatatacacacaaagttatataaatatatatatatatatatatatcttcaacatgcacaagtatatctctaggataaattcctagatgaagaattatagggagaaaaatatgatactttatatatatttctatatgttgaaaatcatcttccctggaggttattttatccatttgcacccccggcagaaatgagggagagtgcctggtctcataacatccacatgctatacactatccaaacatttggctttttacattttggtaagtaaaataaaactctgtatcaattcagtttgcatatcttttattaagagttggtattctcatctttccatgtctttaagacccctttttactttctagaaattgtaaatcatgacctatagtcattttcttattagctttttggatattgaactgacattttacagaaacattttataaattgggaaatttagcagttaagctatgatatacattatcaatattttcccagcttatttaattttcattatgatgattcatgccatgccaatgaagtctttgtttttgtctttattaatattttctttaatgtcttctaaagtttgtcctgtaatttgaaagttattccccactgggagcttaaaaaaaacatcttcctatgtttctttaggttcttatattttcattataaaagtatttcatgtatctgtatttatcccaaaatcatacgtaaagtatattttcaacttaattttattttagatgaccactcagtatcccagtcccattcattgaatagtccatgttttacacagttattcagtatatcgcctttattatactaaatttcaatgcgtattcatgtctaatcttgtgatgtttttattgatctacttttccatatatgaatcaatattggaatgttgttcttattcaaaacttacactagattttaagcattctcattacccttctttttcagaagatgtaattgaggttcattttcttttatttcttcctactgcctgttttgtatatagaaacgctgctggttgtttatacagtaacatggcatgcagctacctgccttcactgtctccttctctacagtgtttcagctggagtctgtggtgtccaggagtcccatcacaccacctgccattctcttgtacaccttctccagttagtgtttgggccattcttcctctgcaaccacattgacatcagcaatgactcccatgcttctcaccaagggtcaattttataactgctcagccgctactgacactattaccaaccaataactccatggcttaaaattatcaaacactgtacttcctagctttcttccctcccccacaattgcttctttacatgttttcctcaaaattttgacatgcaacctttatcatataccacattctcatatgtatttctgtctaattctaagactttttctccattggtaagtttctctatggatggtttgctggatccagcttctccagatgtttcatggatgaagacacttcagacctcttctcttttcagtctgtatttactttctgagggcattcattcagccctttggaaataaactccagaagcccatggtatagttttattcacaactgcaactcaagtgcctgaaaaaaatcctaagacatggtacatctctattagttttctatgactgccacaacaaggtaccacaaactgggtggcttaaaccacacaacttcattttctcacaactttggaggctagaagtctgagattaaggtgtgggcagggttggatggcatcttctcttccctgtctcttcacatggtcttacctctgtgtgtctgtgtcctaatctcctattataggaccaccagttctgttgaattaaggcccaagctaacagcctctttttaacttacttacatccttgaagtgcctgttttcaaatattatacagcagcattctgacttaggtgttagaacattagcatatgaacattgtagagacaaaatactgcctgtaacaaagtccttattacatatttgctgaaataatccattaaggaacttttctcagtttttgaaatagaatctaattcaaattgtattatttaaaatgcaagtggcttgatttggctgtagcatgaggcagaagaatgcaagcataagaggaaagacataaaattatgaaaattcacaactaacaaatataaagaacaaatgacattaaatagacagagaaagaaaataagagtgctgaactctttacattgtgtaaaagaaatcaattggtccacttgttcatactgacaaattaaaatgaaatataagtgtattattcagagctgataataataaaaaaaaaagtaaactatggcaagtggtggcctctggagaataggattcaaggacactttgaccttgaattcacttctctgccatttgtaaagaaaatatacacctgaatgcattattaccttgataaagaaaacaccagctgctaaaataccaccactttgataaagaaaacacccctctctgcactgaaacactgtgcataatgaccacgtctccctttgcttctttctattggatcattccggtgaagcacaaacaggctatcccatcccctggcttaaatcaccaccttagtccacattctcctccatccatgcatccatgacctggtttctcttatttcctttacagaaaatctcttcagaagagttttctatactcattttcttaagtttctcaccaccaattaactttctctttctgtcatatcttttcaaatttttacctttcttttagctacatcattaaatttattttttgtgtttgaaaatttattttgaaaatagtacactcacacatatcaaacaaattcttttcctgcatatattgaaagttgacatcctattccagatcctcaaaattccatgcactctcctcaaagacaaatatattgaagaagttttctgaatatctgaaatagtttctaattaaaataacttaaatgaagggaagtcatatgaaataagactagaaaattttaatatttatactaaataaaaataaacaacaaatatcatgaagtagagaaagatattctatgtgtgctacttacatcttataagaaaaataagttgatccacttgataatactaataaatgcaaaacacaaatataagctgactattcacagctaataatcatcatcaaataagaatggaaagtgtagcaagtagtggcttttcgagaaagagactcgggagactttcactttttatgcacttctctgttgttggaatgaaagtatacatatgaatgcaataaccactgtgatttaaaaatatatgaaagaaaaaagtcaattgtggtcaggccatggtgagccttggatgacattctgatatacctttttcttcatttataaagccccacaatacactctcacattgcttgacattgaacctaggctcacagtggacatttaaaggtccacaacaacaattgattacagggaggtgggccatatgggatgggatgggagaggctggcagtccagactgcaggagttccaaatggagtcaagcagacctttctactgatccatttacccataatgagttgggattgcttgcagatgaaattaaaatcaatggcaaaagtaaagacaaagtttttgtctgtgctagaaaggwtaaaggatcaagcagatggaaaatacatcttagtcactgggatcacgcccactcctctaggagaagggaagagcacagttatgactgggctgtgcaggctctgaccatgcatctgcatgtcacctcttttgcctgtatgaggcaaccttcccaaggaccgacttttggagtggaaagaaggagtcatgggtagtggatatgccctggtcatcccatggaagagttcaaccttcacttgactggagatatccatgccatcacagttgccaataattcaccagctgctgtcatcgacccaaggattctgcatgaaaatgcacagacaaggctctgtataatcagctgattcatttaatgaatggtgtcacagaattttcagaaattctctgattacttgactaaaaaaaaactgggaataaataagacagatccaagcacactgacagaagaggaaatgagtaaatttgcctgcctcgacgccgacccttccaccatcgcatggcagagagtattgaataaaaatgaccgatttctacaaaaaaaatagatgttggcatggatacagtgatctacactgccggtgggaatgtaaacaagtacaactactatggaaaacactgtggagattccttaaagaactaaaagtagaactaccatttgatctggcaatcccactactgggtatctacccagaggaaaagaggtcattttacaaaaaagatacttgcacacacatgtttatagcagcacaattcacaattgcaaaaatgtggaaccaaccaaaagcccatcaatcaacaagtgggtaaagaaactaatatatatatgatggaatactactcrgccataaaaaggaatgaattaatggcattctcagcaacctggatgagattggagactattattcaaagtgaagtaactcaggaatggaaaaccaaacatcatacgttctcactgatatgtggaaactaagctatgaggatgcaaaggcataagaatgacacaatggactttggggactcagggagaaagggtgggaaggggatgagggayaaaagactacaaattgggtgcagagtatactgctcgggtgatgggtgcaccaaaatctcacagatttgatttcattgcatctttcatcaaaactgtcaaagcaccagtcacccccaaatcatcagtgccacaggctgccccgttttgtcacagatcaccactaaagaacttactcatgtaaccaaacaccacttgttccccaataacctatggaaataaaaaaatttaattaaaaaaatacaaacaactgatttctacaaaaaataaccatcaggcaggcaaacacagagaaaggctcctcttggcaaacgctgtttgatatcgtggtggccagcgagatcatggtggtgctggcccttatgaacagcctctcagacatgaagacatggctgggaaggatggtggtggccatctgatgcagaccctggaatggacacctgtattcatgcacgtgggcccttttgctaacatcacccatggcaattcttcagtgttggctgacaaaattgccctgaaactggttggtgaagaaggatttgtagagactgaagctggctttggtgctgacattgaaatggagaaatttttcaacaagtgtcaagcttccagcttggtgcccagtgtggttgtgttggtggcaacggtgcaagctctgaagatgcacagtggcgggccaagtgtaactgctggtgttcctctgaagaaagaacataaagaaaagaacatccagttggtggcagatggctgccgtaacctctagcagcaaattcagattgctcagctctttggggttcccattatggtgactctgaaggtcttcaagwtccacaccggtgctgagattgacttggtgtgtgagctcacaaaacgggctggtgcctttgatgcagtcccttgctatcactggtcagttggtagaaaacggttgcggacttggcttgggctttgagagaagctgcaagtaaaagaagttgattccatttcccgtatgatgttcagcttccaattgtggaaaagataagaaccatggccctggctgtctatggagccaacgatatccagctctctcctgaggcacaaaccaaaatagattgttaacactcaacagggtttcagaaatttgcccatctgcatggcaaggacccacctttctctgtctcaccaacctgacaaaaaaagtgtgccaagggacttcattgtacctctcagtgatgtcaaggccagcataggtgctgggttcattggccctttggttagaacaatgagcatcgtgccaggactgccacttggccctgctttcatgacatagaccttgatatggaaacagaacaaattaaagccttgttctaagtgaacaaggctttcataggaattgattcaggttcctgaaacagactcctccttgcctttttgctgcagttagagaagaaactgaattttaaaaatgtcctttatgcaatgttggagaaatggtgaaataggtcaaggatttcttcctcattgaaggtgtatcctattcacaacagagtatagtgttcagcaaaaggacctccaccaagtctgaaaaaaaataatttacttaagtttcaatagagtttacattatttctactgcttacactttagaatgttaattttatgggactaagggattaaaagagtgtgaactacaaggtaacattttccactcttgagttttctttttttttttccttttttttaaattatactttaagttttagggtacatgtgcacaatgtgcaggttatttacatatgtatacatgcgccacgttggtgtgctgcacccagtaactcaccatttaacagtaggtatatctccgaacgctatcccaccccccttcccccaccccacaacagtccccagagtgtgatgttccccttcctgtgcccatgtgttctcattgttcaattcccacctatgagtgagaacatgctgtgtttggtttttggtccttgcaatcgtttgctgagaatgatggtttccagcttcatccatgtccctacaaaggacatgaactcatcattttttatggctgcatagtattccatggtgtacatgtgccacattttcttaatccattctattattgttggacatttgggttggttccaagtctttgctattgtgaatagtgctacaataaacgtacgtgtgcatgtgtctttatagcagcatgatttataatcctttgggtatatacccagtaatgggatggctgggtcaaatggtatttctagttctagatccctgaggaatcgccacactgacttccacagtggttgaactagtttatagtcccaccaacagtgtaaaagtgttcctatttctccacatcctctccagcacctgttgtttcctgactttttaatgatcgccattctaactggtgtgagatggtatctcattgtggttttgatttgcatttctctgatggccagtgatgatgagcattttttcatgtgtcttttggctgcataaatgtcttcttttgagaagtgtctgttcatatccttcacctcctttttgacggggttgtttttttcttgtaaatttgttggagttcattgtagattctggatattagacctttgtcagatgagtagattgcaaaaattttctcccattctgtaggttgcctgttcactctgatggtagtctcttttgctgtgcagaagctctttagtttaattagaacccatttgtcaattttggcttttgttgccattgcttttggtgttttagacatgaagtccttgcccatgcctatgtcctgaatggtattgcctaggttttcttctagggtttttatggttttaggtctaacatttaagtctttaatccatcttgaattaatttttgtgtaaggtgtaaggaagggattcagtttcagctttctacatatggctagccagttttcccagcaccatttatttaaaagggaatcatttccccatttcttgtttttgtcatgtttgtcaaagatcagacagttgtagatatgtggcattatttctgagggctctgctctgttccattggtctatatctctgttttggtagtagtaccatgctgttttggttactgtagccttgtagtatactttaaagtcaggtagcgtgatgcctccagctttgttcttttggcttaggattgacttggcaatgcaggctcttttttggttccacatgaactttaaactcttgagttttctactttgtctttgaacagaaaataatcatggacttagaaaaccaaacccacacacagagtgggatcaagccattgcaagccctgaaagaccctatgatctactttagtttttagttataaagcctcacaaaacaagctcacgttgcttgacattgatacctaggcccataataaattgtaaaagttcaaaacagcaattacttacaggaagttgaatgagatgggatatgatgagagaggcagatatgtattaataatgggacagaggccaagaaacatctcagttagggatcgtggctcaaacagctctggcttctgatttgcctgcaatcctcatacaggaaatcacatgctgtctgtatcttcataaacctgggttggttgccagttctcattccagctcttgtaggcatctcctaaatgacacaacacagaatagtgttctgaagtcacggaatcccagaaaggctctacccctttagcaaggggcagctctttatctttggacttgaagaaggaggaaaggtaagggtatgtaccaagaactctcttctttccacagcaagttattgtttctgctataagttcacaaacctgtgtttccaccttggggttctgcatacagaagttcataagtttccttcaagaaaaggcaggagacatgaagcttccttctagaaactgagtgctggcagcccagactgcgggagtttcaaatggggtcagcagagctttctccctctgatccatctctccatatcaccccctttattccaactattcaatctgctttcatggagataatgatgctttttaaattcatttaaggagcaaggggatatgcaggcattccttcctacagctgagctgtggttaaggggtcttattattttacttacttttcaaagttattcttctttgcctatctggaaaggtctaaggaagaaacagatggtccaaaatgaaataaatgaggagtgtttcatgaggggactatgtacaaagatggacagggttaaggggaaaagacaatgcctagggaagcaccctaaatggcaatggtgtagcactacttcctcccctaagcttaaagggacagggaaggagcagttaccattgagagcacagccatagccatagctgtagctgtagggttgggagaggatgagcaggcaggtggagaagccctgcatcaccaacacacagccacaaaggcagaggcccaggaggtgaaaattccaaatcactcccctcctgccttccagtctcctaccagtgtctctcagtgtctcagttcaaccagaaaccaaaaggaaaagaatatcactgatgaggtacagagaagccaccctcttgggatgtcaaacagggtagagaagattgggaagcaaatcctcaaggcaaatgaaactatcccactcacctttttatatcttcctcctacctcctggggttttctctctctaaatctcattgaatcatgtctcatttaatctctatcagagttttttttatgtttggaaattctttctctattgtcgattttatggagaaatacctgcatttatcaaaaatgcctaggaagtgaaatgtaattttaaaaagagaaaacatattcctttttgttagaatgtaagtttggctgctctaaaagaaacacgaagtaggaatatcttaaacaagaaagtacagttgtccctccatgtcagttggttctgaatccctagattcaacaaaccacaggtagaatatattccaaaaaaaggaggacaggagtagctgtataggtactgaacaggtacagacttttctttcttgtcattatttcctaaacaataccatataacaattatttacatagcacttacattttaataggtattataagtgatctagaaataatttaaagtataaaggagaaagttcataggttatattcaaatactacatcattttctataaggaaattgagcatgggcagattttggtgtgtgcaggggttctagaaccaatcccctgtggatactcaggagtgactgtatttaagacctgagctggaggctccaaggcatcagacattaggactccaaaaattgctgctccctaatgtctagagagttgccctcattcttgtggtcctactgcctgccaaccacctcagcattccagcctgatggagaaggaagaggggaagggaaggctgtgctccttctattgatcccatgagccaggacttgcttacatcacatcttcttacttcccattgaccagaacctggtcatacaatgtcatccagcatccaggaaaactggaatgtgtgtccttgtgctgcttttaaatgctcagaattgttgtttgactgaaaaggaaaatggatatggggcaatggagtaggctctaaagctcctgattatctcagattctatgctcacatcaagatttttcaggaggtcctcaaaaataatgattgatgaagcagaaaacagtagagaagtctcatgcagggctccatggaccaggagcttatactggatctgctcttcatagtgtgatctcaggaagatcctttgattctttaagcctcagcagcttcttgtgtcataggaggatattacaatagatggtctttgaggaacacaggctaaatgctggcaatactacagtgaaccagaacaggcatagcttagtttttatggagcttcaggttttgtaaggaagacaaatatatcatatcctaaaaataagcggacaaactcttaatcttaagtgtcctcaatgtggttaacagaggttctggttttccgttaatttccttttcaggacaacgaaggctgcggcagcttgtatctctaagagagctcaggatggatgcatccactcctgatgctcctttgtactcccagaggagggtgtgtcttctttccacctggaggcctccagcccctgtgcatccttggcattccagagcaaaggcagcctttgtgatgcagaaaggagctcctcaatttgttcctaattggttttcactcaactctatttggttccctatttgatttgcttctcattctctatctggagtttgtttaggttagcttttttttttcagtccaaacttttgactgccaacttgggttaaatttgagagtcattcctctgccttccccctctatcatgtataatagacatacagtggtgctgggtccaaagggctggtgaaaagggtagaccttgaggcagctctgctgggtccaaatccgcactgtgtaagaccagggacaaataactcactctttttgtgctctaattgcattctctgccatataggaataatactaactcttacctcctaggctcttgagagcattaagacaatccctaataaactctcaatcagctgctgtttttcagccagatatgagctagtcctgtttcaccagttgaaatctacatgaacatctcttttttcattccaagcgctgaactcctatttcctctcatggactcctctcatacaaatgtttgcatcaacagagaaagtctaccaaagatctcctgtgagacagaatcaagttgttttgcactgtgtacacccagcagaacacttaggagtcctccaaagatattgctacatttcaattacctctttcagcggcactcagacctcacccacgcttactctttctttttctatattgctgagcagttcagctcagaccacaccctaccccaacactgtgtacaaaagagattctaggggctcagcaaagccacactgagtcctcatttcaaaggcacatcagtagtcaacttcaggtatttgggcacatatcagtaatgccttttaacacagacggaacaaataaaattctgatgaatgaaatttttacatctcattatatgtgggtgttccaacacctttaattgtgtttttatttttattttccttttaatccaaagctatcactaccattaggctcttcattcatgcatttattcactgaatgaatatttacacaaaacacagtgtgctccacatggagctaggcactggggatataaaagtgctcctct

SEQ ID NO: 94031 - DNA, 42132 bp, Homo sapiens
ggttctagggcagagggtggagaagcagggcgctggggctcactgcagacagacaactaaaagactggctctgctatcctggcaaagggcctagaaccatttgaaaactcctgattagataattgggtagcagccttccaactctgagcatccattgtttagtaacttgacttaggcctcagtttactgagttgggctttgaaatatttttccttttgtttccaggattaacttacagagaagcaggcaagatgaccttgctgcctggggcctgctctctcccaggaattctcatgtgggattccccttgccaggccggcctttggatctctcttccaagcctttcctgacttcctcttagatcatagattggacctggttttgttttcctgcagctgttgacttgttgccctgaagtacaataaaaaaaattcattttgctccagtaagtatggcctcatttattcagtccttgaccctgtgatatcaggttgttctgtccctgctatttgtgggatccagagctagggtgaaaacgaagttttgcatatcatgtttaaatattaaaaacagctaacatgctgttaaaatatgacttatgctccaacattaacacatacaactttgcaaccacctagaaggtcagaacctgaaaatttaaaattctcagactccttagaataccacaccagaattcccatctttgcctctgtctctcacagtaggagcctcatgggcatacttgtggacattgtaggctttgtatccaagcttcatctgcactctaccctctaccctcaacctccaacacacaaacccacccacacacacatacacctgcctctgggctatgcatgtgcacaccggcgttgtggtccactctcagtaaagatgggcccagggaaaagtcatgtgcaggctctgagagagcgcacaggctcttctggctatttgggtagaaatgctggatgtctggatcatgatttagaagaggaagtatgtgagctttaggtgaatgtgctcctagcctggcagtctccttaccttgtggggaggggtgcaactggaagagggcccaagtgggaccctccaaaggagggtcagcaaactacggcccatggatcaaagctagcccactgcctgtttttgtaaataaaattttattggaagacagccacactcagttttttttacatattgtctgtggctactttctcccaacaatggcagagttgagaagtatgacagagatggtatggcctgcaaagcctaaactatttactctctggccctttacagaaaagtttgccaaccccttttctaaagcacggtgctcacagcaccaggtctaagactgattccggtgtcagactccttaattttaggatgaactgttttcccccattttcccaatttcttccaatcttttccgtctagaaaagccacttttatcctgacctttgaacaacagtttcatgcacatatttaattctcatggcttgtgaagttagtgataataaacccaattttcagatgagctaactggggcatcattgtaagggtacatgtctgataagtggtggcaactagactgaatccaagaaggcggctgcaccagaatgtccgtggaggagggcattagaggtggctacacgatcaaagcagcataaggtgggaatactaggagacttttttcaaaactgctttgaatatcctattatgatggaaaaccccagacgtacataccaaagaatgggaatggcaagcactgacagatactaggggaagttagtccccaaggtccccttgaatgctgctccagtgctcagatcttcttactacaaggtagaaattgcttgggcacctctctggctttctaactctggctttctaactttgcttcctatggtaattgaattctcaagaagcagaagatcagagtaattaagaacatagtctggagccagatctcctgggttcacacacagtggctttgttaccaacctagtggctatgtgaccttgggcatgttatttatcttttatgtgcccccagctttctcatttttaaggtggggataataacaatatctacctctcagggatatgataatggttaggtaagttaatatttgtaaggcatttgggcaaatgcccgacacatcacaaatactatttgtgtttgttattatttccattaaaaggaaaacattagataaaacaaatccaacagagtttatttgagcaaagaatgattcaatgaattcggcaacactcagaaccagaagaggttcagagagctgtcctctgcaatatggagaatgagtatttatagacagaagagaaagtagagaaatagtctaattggtcacagccaggagtttgccttatttaaacatggtctgatcagttggctgcctctgattggctgagatctggttactgttacaaaaaaatatacttctaagttaggtttcagtttatgtacatactacattaggttctagatcattaggagggactcaaactacagagataacctcaggccaaagttaatttaacacttccattatccagctgctgtaacgggcacaagagagagtatgggcagctgcccaacacattaaccttggccttgcatggagcctaagagcccattaaaggtctatgtcttgggctctaagccgtgaactcatggagccctctctcatgcttactgtgaggatagaaccatttgttttgcaaacatccaggagaagattaaggaaatcaaggccccttgtttggctggggttggggatggattctggtcatcctttcctctcctctcctctcctctccgctactttcctttcctctcccctacacccctacccactacaacccctttgaggagatctttgtaggctaagagtcttatgccaaggaggaaccatatcttagacttgctcaggggcagtatgggtgagagtcaggaggtcgtaagaacccaggccccagttggtctccgcttggattacagctctgctacttctcggtgtgatctttggcagtttgcttagtctcctgtccctcagttttcctaatacgtagaacagatgacagtaatagcatcttcctgaagggatagttttgaataaacgaattaatacatatgaagcttttagcacatcgtaagtgctgaatgaatgttcgctattattgtgttcaacactgctccagttctagttagtcaatgcctccagtttttgacattcttctagtgttcagacagaagctaaacagtcaaaagcctgggaaggatggggacagattttaggtaataaatagctttggaaatgccatcagctctgcacaaccatacacatgtactaaagttggtaggacccatttctgttttctttgtgaatctaatttgcctttaaacggatccggcctcaaagatcccaatggtctgagtagcatctcccagaaaaatcttgaaaatgtacctggcagatctcttaagaaggaggtatcttggcatatactgggagtggagccagcagcaagactctctcctagatgggatttcatttaagttaggctatgtcgatgcctcggggctaatgtcaataccaaaggtttttttaaaaaggcctgccttggaggacagcagatcacatctttggtactttcgttgtcttctggggcagagggaccctcagaaatggtctagaaacctatgatgtggcatcatggtgggcttcctgtaggtggcatccctttatgtatgggtagtaagactggggaaggagtggaaggaggtgggtcctaaaatattgtgattttcaaagccttgatccctgggcatttttgcagctgtcttttctctgatatacattgttcccgggatctgtcccagggcttgctgcctctcctttctgagtcaaagcataattagaaatgtctgtcccaggtgaattttctctgtcctctgtaaaccagacaacatttgaataaacagaaacaaccttggaaaatgatgctttctcatgccaaacttgatagaactcacaaacttcttgtagccactacccaaatctattgctataatagaatcaaggtattagggcctgggcagggataaacccacccaggatggtttatccaggaatgcggtcaaatggttatttgatgtcctttgtccatactcctctgctagcatccatctggtctctttggacacatgggacctactctgaccccaaatgactttggactctaggtcagcctcatacgtgtgccaaatatgccattttcctcaaagaactttcagtcaacagccttttaaagctgccttcccatgtgtccctgggttggttacccaagatggaaaacacagataagattcagagagctaaggggagccgtatgccacccctatccctttattcctgatctcccatcatgcctgctgaagggggtcaggtgcaggatgagagggcctgcatgctccctataaaagctgttgagtaccccactcagacctggaacttgcatttaggacttcccagaaaaatgggcaagctgctgattcttgctgatgagtctttcccaggcaggctgagtttagctttcagagcagctgcctgttctcctcagttcacttgctgtctcctcccctatcctatgttccaaaggcctgcactctgtccttcctccgtctcttgcagccttcttgagttcataacatggtggggaagtaaggaagagttcactgagcaccttagggcttcatactggagggaaagtggataactctggcagaccaggacaaggccatttccaccacgtgaaataatagaagacttaggccagcccccaccccaacccctttccagtgttctgtgattcccgctcagtgccagccacagagcaggagcccaagacactcacttaatcaaagattaaccaactaccaggagcaattagtagaaaaatgaataagacagatgtttctctgaatgtagaactctgggagcaggtgcataggagggggtttgggagagaggaagaaaaggcctcaaagagttaatgcagctcccccatggctaacttgtttcccagagagagtgaccaaactgtagaaagaagcccaataagggtgatcactgggatggcacaacagcacatccagggtgtggttgggtggcttggaaaaggatacaatttaaaaacttcatctgagttgaaaagcagagtgtagttgttcctggaaaagatgagttgtagctctagggtgaagagactgctatgggaaggggccctctgcctgaaatctccctttcttcaccttctatgcctcctgtgcccctccccaccaatctggcttatctttagggtccattcattcaacacatattgatagagagctgactgtgtgctgggtagtggggactcagccgtgtcagcacagtctttgccctcacagagctcacagtctgatgggcagaccaataaacaatcatctttcagtgtggtaagggctgtgatggggataagcacagatgtcaaaggggcctagagggacagcagggagttccagtcccaaggtcacctctcttgggaagtcttccctgacctctgtgtctcaattttatcacttgtcatatggcattgcacctatgtgcttacaggtgtgactttccaccaggctgtgagctccttgaggggagggaccctgcctatgtagttttttgatctctaccacccagtaattaatataggtttattgaaagaataacaacacatcctcctggctcctgagtcacacaccatcacctgagcttccgggtagccaagtgaatgcctacattagccacctgctccaaatatgtcatacactagcctatgttgggaaagggtttatagagcagagggggcgtcaagccccatctccctttccccatttactggccatggctgccataggcttgccccttcccagccagagacaggatgaccctggcaccctctgaccaagayctttttgtctttaggtctggccctcctgctgcagctgggtaagtatcccatgagagggttccccaaaagataccaacagcagaatgtttagcctttgaatgctgtccacagtcactctcatgccgtgcttcattggtagagccttcagcrtccttctccccaggagaggcaggttgctgtcatttttctggattcttttctccaagaaattcaactccccagcatcctattctgtgtgtcacaggaggtgccatccacaaaggattctctgtgaatagtatcccctgaagtttgccatgttgctgtacagccccacaacaacctatcaactagctgccaatttaacctaaagtttaacctaaaattgcaccagctaaatgcttagcatatttattgggtaactactgtgtgcaaggtgcttttcatttattattttatatacccacacattaaatgcaatgaagtgggcatattaaaaccatgttaaggttgaggcaactgagtcatagggaggttaaaagctttccctagcccacagaacccaggaaggccagatcaccttatcagctaagttgatgcttttgtcccatcaggaatccaatgggtaggttttatagtcragctcacaggaccatggtataaaggacttaggtgtgagtcctggctctgccaccttacgagttggatgatckcggtcaagttgcttcatctctctgaataccacttaaaggtcaaatgatattaacagcttctgccttgtggggttataagarttaaagaagcaatgcgtgtaaagtacctggcatttagcaggcactcagtaaatggtagaygcttccactgccggtgttccttgctctctcctagactcagacttccagctttctggcctygtgtatcccggaagctccagccaatctactttctgtgctgaggggttgatatctggctccctcatcctccccaggatgccctgtcttttcttccctgaagttcccttctgcaccagggtccatcagcccactggcagagatgggagcaagaacctactcaatgagttatttatagcgtgccctggaggactcatggcacaagggccccttgatcctacagagagctctgttcccaacacaaaggccttgtgtggaatgtgagggtggagggaccgactggcaaatgacagctcgtttcaagtggaatttctttacactagtatctttttatctccagcaacacagaactgaaaacctcgctgtctattggtggctggaactttggatcccagggataagacctagcattcaggattgaatcatttccagattaatcagtctcttccaagctccaaggactgtaagtttctctraagtgagtgaaccccgggcctcagaccccagtgtagacatcccagaactcttctctgaccaggtctccctgaagtctgctcttccttcatcatagctcttaccacactatttttttaaattggacatttcatgattttttgttatattatttttaacttagttttttaattgacatacaataactgtacatatttatgggatacatagtgatgtttcaatatgtataatgtagagtgatcagatcagggtaattagcatattcatcatctcaaacatttgtcatttttttgtgttgacaacatttaatatcctctttttagccctttgaaactatacattattgttaactatatagtcatcctataccacactgtattttaagttccatttacttatctataccttcctctatatgagctcctccagggcagaaactattttattcaccactctatcccagcaatgttaataaatgacagaataactgaatgacagtaaatgacaatagatgacagaataactgaatgtatgtccaggcaaatagtaaggcggataagtggcaagacagagtattcaggagcttaggctactgtgatttaggctacaatgacttattgactccagattctctgatgtggcggccactgctgagaaccgccagaccttcatgcagtcagccatacagtttctgaggaagtacaacttcgatgggctggacattgattgggagtatccaggcaatcgtggcagcccagctgacacccagcagctcttcaccatcctgttgaaggtgtctcaccctcactgtgtccaaagaatacatgatctggcccacagcgggctgggagttctggagaggggttctgagagaggctgaatatatgctggccaggggtgtggatctcaccctttctggctcacagcctcatctctttagtgtaagagcagatctctcttttggggaaaactccgactggcagtgagaagtatatctttgagcaccaatgttagcttcgatgctcttatttccccttcttccattttttctgatgattagatgcaatcacatatacagtttgcagtgctggaggccatttttgtctctttaatacaatctccctccttttaaaataaaattctactctggacattatttgtttattttaaaatttaactttcagaggatgaccgaatttccctcatttccaagttttcggaagasagcttactgttatccccagataccaacaacagcttttggatcaaaggactctaaaccgagcacgttgcagctttcttcataagagctgtgacctcgtcacatgcccacttgtccctctagcctgtgttcagtgtcttctgtttcacaggaaatgtatgaggcttttgagcaagagtctacccgcagcaaaaagcccagattgttgatgtctgctgctgtgtcagctggcaaaggtaccattgagactgcctgccagatccctgagatgtcgaggtaagcaaacccaggagctcatattcagagctaagtgacccttagaccttccccgggcattgtcaaatgcccagataccagtgaccaatgctcaggtacccaggatagagaggactctatctcagaggaatgaaatgacctcaattcctgaggaagaggcagagggagacagtatgaatgctggccttgtttctaagtctatctccaaggttctctagggcaaacggccatttggagaaggttaattgagtctcaagcttctacaagtcctgaaggtctgagtgtaaccagatagtgatcatggaatgggtgccttttatattccaggtgctcttgagatgaaggtgagggagaatggaataaagaataacaatgcataagggaaactttattgcatagtggcaaacagcagatttggctgtttgtcaaatctgcaatcagccgatttgggactaggagtgttaggggtagtgggttagaaagaatgatttcccttgggtcatttatttcctcttgctctctctcccagctacctaaggtacatggacctcatcagtctgatgacctatgacctaaggggctcctgggagggcttcataggcgaggacacccccacttgcaggacctaatgaccagggagactacaaatacttttatatggtgagtgaggaagccagtcctaacagacatcttcaaagcctgtcastggatcccctgccccagactgcaaaggagaccaagaaacttgatggacagctcatgttctctacctccctgtccctgtgactgattgtatccattcatctttcacaaaaaaggaagcagaatagtggcttgggataatcycaaacattggggaattttaaaaaatatattttccatttatgctaggagcacatctcatgatccatcttcttcccactcttccttccctcccttccacyctctttcttcctaatttatgtggtttaggmagctgtaatagttagtctgcctaatgattagtaggtgagtaaatgggctagatgtcatttcagtggagatttcaaccagggatttaaaaattgacatgggaaaatctcccagtcgatgctccatgcacgaacaattctcagcattgtagtaagcccatttggaagacaagtggatgcatggctgaacaccagtcatgccccaratgaactccagtatgaggaaaaagaggatctctggctaacactgggccctgctactaaarcaatgaacctctcttaayaccyrttctagaaggggcagcactcctttcctttcaatgagattggactgtggaaggggtttgactggatgctgtacctggagatactagggaattaggcagaaaacctggctgttccaaggcctctgggtacatactcagctgctttctcatgatatcttcctcatcttgcctccaggattaggcaatgaactactggaagagccaaggtgcctctgctgagaagctgatggtgggctttggggcttatgctcacaccttcactctcagtaatcctgccaatcatggcctggatgctcccacttctggccctgggacttctgggccctatacacaggaggctggaacccttgcctactttgaggtaatgtcctcagagggcctagaggacccactctctctgttctcaaggttgaagataagtcaatggagagagtctacrctctgatttccagtagagggtaccctgttgctgactgctctgaatatatgtggcagtgagagraaggaagagtgaaagattgataaaacatcttaaatgttaaccttttaaagtaaacwtgcatctttaatattagaactagctaatgcttactgagtgcaaatggagagccaggttgtgctccaagtgacttttatatatcatctcatttaacaaacaataaggtactgcattctccccatcttattcaagaggtgactgaggcacagagaggttaagtaatttgctcaaggtcacagaattagtaagtggcagagctgggattcaaacttaagttgtccagctccagaatctcagaccttacccattatgctatactgtcctcttattagctgttttgagacacaactctttcaaacggaamaaattcatttcaaaaggaaaccaggacacaaggcataargaagctgcttgttcattgttgcacatgaggttattggcagacaaaggactgaattcatgtctcatctctctagctagagcactccactgtcccatgggacaaaagcagggcagggagctgggtgacactggaaccagkttctattatttccagcaaaggggaatgggctgggatgaggatcttagaaaagaaatggagggaggacagagaattggcytgagtacagcagggccaatctgagttatgactgctccttctgtacctgccccagttctactccttcccgaaaggagccacctaggtgtggaatgccccctgggaggtgccttatgtctacaaggggaaccagtggatcaggtacgacarctccaagagcttcaccctcaaggtaaggccctccacactcttcctaatgcatggttggggagagttgggggacctaccctccagttgcccttgaattgcaatcccaggagacccctgagggaggtgaggagagacacagagaggttgtgaagtttcagggtgagccagtgacccagccacggagcctgacagttggagcaaccccttcacctccttttccttcctttccttgactcctgcactttctccttcttcccacccctggagactctcctttggccccctcccctgctcttctctggtcctcatgcagctctttgattcatgcttcctgcttcttgatacaggtgttsttccccactccaaagacaaagtgtagaccacagagttttttgctctcctttgcctatctcctgcccatggcaaattcacacaggctgagcccaaatcgggaggcgatagagcctctggtctgtgaggttatgctcaggtctggggaggacataattgctgtttatcaatcccagggcccttcaccctacaccttccatctagagccctctcactttgcccaggtactttgctttgtgaagggccctatatctctatagcactcaacccacccaaactccagctctgaggtgccttctcagaaggtggttggtgataacaaagggcagggggtaagagctgcttggggccaagactcattctctgtgacttagtcctacagtcctgtacatacaaatatgttcatgaattcctcaaagttgcctcctcaaaacccacccccagtctctcctctccatgactagatcatggtcctcctgccatcctgctggagttactccctgcatttgtgcaaggacagcccagaatccccctggttctcttcctctggtttagtggctcctaaagaacagatttggaggggccattgtctgggccattgacctggataatttcacaggcactttctgtggatgaggcaaataccctctcatgaatgcactcaaatccgcgcttggtgtctccgcacccagtaagtagtgatgacctaacagccatgagataacaaactagacatggttaagaggaagagaagaccagagctcctcccagtctcacctcaaacaaggcctcctccagatcttccagctgtcttagtgtgtccagttggaacttgcatttaggacccagaaagcaagacccagtggacttactaaagggcaggccatgagtgagagccctggcaagtaaaaggggacctatcaatattctggaggattctcctctgtagagctactcagggaagcttctataaagtaaactgaacatgctggagcctgggtagggaaggggacaaaaacaccgtattccctgtcactgctgctcggctccagcttttatgaactttgtgggtcagaggaaaaaaaaagcaagggagggattaaaaacttagaagatgaggaaaggaatgagagaaggagaactctaaaggggctcagctagcatctttcctgaagtggggagcagagctacagatggtctcaacacatgattctatcccagccccgagaacagggcaagtccaggaagaaagaggggctgggaagctgcggaaaaagctagtgctaatgattggatctttattccgtgtcaagcctgctggttcttttagatttcgtataattctcataggcactcttggtgccagstgtattagtttacttacaaataaaagctaataattatgtggtactcactatgttatatagcgtgcacattggaaaatgctttacctaataattctaagagataatacaattatgccatcatttcagagaggaaattgaggctcagagaagtgttaatgaatttctcatggtcacatagctcatggcagagctgggctatgaacttgggtatcctcgattcaggctcagagcattaaaccactggtttaggtaggatgtgtactgagagaaacccacagtgaccttacagacatgacactcatcctgggaaaggagtcctctcctgagcttatggggaccattttccttctctcttcagattgcagagtacccacctctatcctgggcaccagcttggcccccatcatcactgcagcacctgggggtggcagcacaggtggcagtggattctgtactgggaagtccaaaggtctgtatcctagtcccaccagcaagcatgctttctacaactgtgtggatgagcacacatacgaggaggcttgtcaggaaggcctggtctttgataccagctgctcttgctgtaactgggcataagctattcacctgctgggtcccttggagattgtaagactaaaggatgattaaagggaagttttgcatgtgaatgccaagttgtctgttttgatttataaatctgtgtgatactatcctgcaagtaaaagacaacctactgccaccccctaatcctcgttgtccacaagctcccaggagatgcccaaacattgaggctgagagagaaggaggaacaggtacctgggacctctctgagcatctctatgggaagttctggcactctggcccctcctgaagcaggacgagagaggaaataggctctaaggaacaagagaaaataaagcctcattctttctcacaaatatgccttcaaagggtcttgcggaaggacccagaagagtggctggacttggaacacttaatttacggcatccaccctctttaggaactcttcacgaagtttactcatttcccaactccatggcaaacaaccctaagaaagcctgtgttttaaagacaaagcatgatgggctaaccacaggctagtttacacacacctcttccacacctatgaggttaggaaaaaagaccatcgccgatgatttcaagattacttcatttccaaaacaaattcatttattatcattttattgccacaccatgctgcaacgtaccctttgattcccttagggaaggcaataagaaagctagaagaaaaaccacattacagcaggagtcagaggtcctctttctcctaccacctccagagcctggccttggctttttccccagttaccatgctgcagaaggcaggaaaaatgcagctcaccaagcaagggagacacctctttgtccagccaccttaacttgtttattggtggatagggagggagtctgtggattatacgcttttgacaaaactgtcataatcagtcataagcagaatccccagaagtttattttgtccctcccatctggctagctggagtataagcaggatgtctatacatctctgtttgctcgggaaagtcctggttaactattgttccagtgtccaattcatttagcaattgtgtgggtttaaaatttttattataaagtatttttattactattgtattgaagttatatgacatgaatttatacacytccactttatactactttttgccgtgtttcataaacagagttctttaatatgtggttaaatctgaacatttaccagagataacccctctcctttcctggcccttttctgacaaaacaaattacagccccctttcaatgactacttgctgggtgcttgctaataaactgatgtgcactaggacggaagtagctagagatagctatcacctctggtctccaggactggtgagggactgctgctcctgccaacccctttgtggaccagccagttgtgccatggcctgtgagatgcataaagccatcaggccacatgtcagtaggatgagtgggtaattataggttaagagtatgtggaatataaacagggaaatattaatagaaactaagaagacattccactgagtttgtagagagtagtctgaatgctcttcctacaagggctttatcatctattgtgtagtataaatctacaaccacttatttattttattgtttggtaacactttttattttgcaaataaatgcttttgtcagcaatgagctttaaaatttcaaatgtctagataataaaaaattaagtaatgaatttccattttccaagaaagttgatggtgaatgtataacttatgtacaacttgcataagatgttggttgacatttaccaaccaccatggggttgtttgatatagcatgaaaaccaaaagacatgaatctgctgaacaagcatcagcatctacttcaaagaaatcattattttaagaggattttgcctaaagatgatgatttcacaaaagtagttgccaaaggtattatttatatcactaggtgccatggtctgaacgtttgtgtccctagccaaattcattgaaatcctaacccccaggtgatagtattgggaaatgaggcctatgggaggtgcttagaattagrgaccttataaagagaacccagagaactagcaaacctcttccaccatgtaaggacacagctagaagcttttatgtataaaccagaaagtgggtcctcaccagacactgaatctgcccacttcttcatcttggattcctaacctccagaactggggaaaataaatgtctgttgtttataagctacccagtttattgtattttgttacagcagcctgagtggactaagacactaartgaaacataaattttcatttaggtagatcaagtgactgatgcttcaaattaacttttctctttttctattccaagttttatatctgtgtgtgtgcatatataaaagtgaagttctatttgcagaacaactttccaagcttttaaataataccaagttaatatcaatgtcatcagatatttcaaatagaaaatcagataagatagttattcaaataatgatgggatagttggatttttttttcacacagcttatgaaataaaaataaagctttttggtagttcatttcgttaaaggagagacattggatgttatcataaatgctattttaaattcagttaaatagttcaacactaaaattaattattttgtagtgatatgaattcaaatattgatggaacataacattatgtaaaaacagtattccttctaaatgtcttagtccatttatgctgctatagcagaatactgcaaattgggtaatttatagaaaacaaagatttatttctcacatttctggaggctggaaagtctcagatcaaggtgactgtatctggtctctgatgaagaccttcttgctgcatccttatatggcaagaaagcagaagggcaagctagctgaattgctgcgtgaagccactttgaaaagggccttcatcctagttggaaatcatcattctcagcaagctatcacaaggacagaaaaccaaacaccacatgttctcactcacaggtgggaattgaacaatgagatcacttggacacagggcagggaacatcacacactggggcctgtcagggggtggggggctgggggagggatagcattaggagaaacacctaatgtaaatgatgagttgatgggtgcagcaaaccaacatggcacatgtatacctatgtaacaaacctgcacgttgtgcacatgtaccctagaacttaaagtataataataatgataaaaaagggccttcatcctattcatgagggaggagcccatatggcctaatcacctcttaaataccccacctcttaatgctatcacattggcaacagctgaattttggaaaggacacattcgaaccatagcagcatgaaacatctgacatcattgtaaaagctattgtagattcagtttagaagttcagcattgaaaatcaattatttttatggtgataatatgaattcaaatattgatggaagcataacattatgaaaagcaataaagtgtattttcttctaaattaaaacaatatagggcagaagtgttctaaaaattggytgcaggctataaatcactctatatgtccccaaaactgatattttaycattcaaaataaaaattgtcaaatttttaggtatttttatatacatagagtaactgatctataaaattttattaacaacactgatactgaatacaagacaacacacatcacggcactatgtgctttctctccttgctgcctattgtcaataggattttagaaatgtttgagtcatggaagaattactttttaattaatttgaagtgtcccacgatagtattgaacttttttggtacacaagtcttctaagtttggttgcattttattcaaaattattataaatttttcttctttaatttctgtaggcacatagtagctgtatatatttaggggtacatgaaatattctgttacacgcatataatcataataatcatctcagggtaaatgggtgtctatcaactcaagcatttatcctttgtgttacaaaaattcaattatactctttaagttatctttaaatgtacaattaaactattattgactatagtcaccctgttttgctatcaaatactagatcttgttcattctttctatttttttgtacccattaactatccccacttctccctcacccacccactatcctttccagggtctggtaaccatcattctactctctatctccatgagttcaattgtcttaatttttagctcccaaaataagtgagaacatgtaaagtttgtctttctgtgtctggcttatttcacgcaacataatgaccttcagttccatccacattgtcgcaaatgacaggatctaattattttttatggctgaatagtgctctgttgtgtatatgcaccacattttctttatccatgcatctgttgaaagacccttaggttgattccaaatytgggctattgtgaatagtggtgcaataaacataggggtgaagatatttctttgatatatggatttcctttcttttgggtatatactagcagtgagtttgctagatcatatggcggctttatttttagctttttgaggaaactccaaattgttatccatattggttgtactaatttacattcccacaaacagtgwatgagcatcctcttttatccaaatatgtgccagcatttgttcttgcctgtcttttaggtgaaagccattttaattggggtgagattatatcttattgtagttttgatttgtatttctctgatgattgattatgttgagcacctttyatacacgagtttgccatttttatgtcttcttttgaatttctgtcttttgctcattttaattgaattattagtaaaagacttatttcctatagagttgtttgagcttcttctatatatatatgccagatggatagtttgcaaatattttctcccattctgtgagttgtctcttcactttgttaagtgtttttgtttttttttttttgctatgcraaaactttttacctggatatgatcccatttgtccatttttgctttggttgcctgtgcttttggggtattactcaagaaatctttgctcagtccaatgtcctacagagtttctaaatgttttattttagtagtttcatagtttgagttcttagatttaagtctttaatccattttatttgatttttgtatatggtgactgataggggtctagtttcattcttctgcatatagatayccagttttcccagcacaatttattgaagtgactgttctttccccartgtatgttcttggtgtctttgtcaaaaaggaactcactgtagatgtacggatatgtttctgggttmgatattgtattccattggtctatgtgtcagcatgccagtatcatgctgttttggttactatagctctgtagtataatttgaaatcagataatgtgattcctccagttttgttatttttgctcaggatagctttggctattctmagtctttcgtgcttacacataaattttagcattttttttctatttctgtgaatatgtctttggtattttgatagggattgcatttaatctataaattgcttggggtagtatggacattttgaacaacattgattcttccaaatccaggaacatgaaatatctttccatttcttatctcctcttcaatttcttgcatcaatgttctacaattgtcattgtagagatgtttctcttttggggttaagtttattcctacatattttattttatttatggctactgaaaatgaggttactttctttatttcattttcatattgtttgctgttagcatattaaaatgctacagatttgttatgttgattttgaattctgcaactttactgaatttgtttcagttttaatagtttttggtggagtatttaggtttttccaaatataagattatatcatctgtgaagaagaatagtttaacttcttccttcccaattttgatgccctttatttctttcttttgtcttattgctctagctaggatttccagtactaggttgaataacagtggtgcaagtgggcatccttgtcatgtcccagatcttagaagaaaggctttcagttttccccattcartgtgatactagctgtgggtctgttgtatgtgacttatatcatgttgaggtctatttattttatatccagttatttagtgtttttttaatcatgaatggatgttgaattttatcaaatgctctttcagcatcagttgaaattatcatatggatgatcacattgatgaatttgtatatgtcaaactatccttgcatctctgagacaaatcccacttggttataatgatctttttaatgtatttttgaattcaatttgccattgttttgttgaggatttttgaatcaatgttcatcagggatattgacttgcagttttctttttttgatgtgtctgtctggttttgttattagggtaatactagcttcatagaataagtttggaattattccctcctcctctgttgctcagaatagttgaataggattattattagttcctctttaaatgtttggtaaaattcagcagtgaagttgatakcatttggatctgtgtccctgcctaaatctcatgtcaaatcttaatccccagtcttggaggtggtggttggtgattggatcacgggagctgatttttctcttggtgctgttctcatgataatgagtgagttcttgagagagctgggcaactccccatcactttctcttggtctggccatgtgatgtgctggctcctcctttgccttccaccatgattgtaagtttcctggggcctcttcagatgccagcctcatgctttctgtacagcctgtggaatcatgagcaaattaaaccttttttctttataaattacccagtcttaggtatttcttcatagcaatgtgagaactgactaatacagaagccactgagtcctgggcttttccctgctgggagacttttattacagcctcaatctcagtacttcttattggtctgctcagggctttggatttctttatggtttccctctgtaggttgtatgtgtttagaaatttatccatttcttctaggttttccaatttattgacatatagttgctcaaagtagactcatgatgctttgaatttctgtggtrtttgttgcaatgccttygtttgcatctctgattttatttatttttgtctctttttcttagtctggctaaaagtttgtcagttttgtttatcttctcaaaaaaacaactttttattgtttcactgatgttttgtattttttgtttcaattccatttactttagctctaatctttattacttttttttgcttcaactaattttgggtttggctttctcttccttttctaattctttaagatgcattgtgaggttgtttatttgaagtttttctactttttaaatgtagrcacttccatattagtattgctttcactctatcctacaggttttggtatgttgtgtttccattatcatttgtttcaagaaattttctaatctccttcttaatttcttcattgacctaatgttcattcaggagcatatttttaaatttttatgtgtttatatagtttccaaaattcctcttgtcatttatttctagttttattccattgtgctcagagacgatacttgatattatttcaattcttttgaatgttttaagacttgtgtcctaccatatgctctacccttgagaatgatccatgtgcagaggagaagaatgtgtattctgtagctgctgaatggaatgttctataaatgtttattaggtccatttggtccataggacagattaagtccaatgtttctttgttgatttccaatactgaaagtggggtgttgaagtcttcagctgtcattgtattggggtctacctctctctttagctctaagaatatttgcttttcatatctgggtgctccaatgttggatgcatgtatatttattattgttatagcctcttgctgaattgacccctttatcattatgtaacaactttctttgtctcttcttatagattttgtcttgaaatatattttgtctgatacaagtatagctactcttactctttttttggtttctatttccttgggatatctttttccatctgtttattttcagtctatgtatatctttatatgtgaagtgtgtttcttgtaggcaacagataattgagtcttgttttttaatctactcagccattctatgtcttttgatctgaaagtttagtctatttacattgaatgttattattgataagtaaggacttactcttgccattttgttatttattttctggctgttttgtgatctcctcttacttctttccttccttcctgtcttccttttagtgaaggtcattttctcctgtggtatttttaatttcttgctttttatattttgtgtatctgctgtattttttttatttgaggctaccatgaggcttgcaagtaatgtcttaaatctcattattttaaactgataacaacttagcactgattatataaacaaaactaataaataagcaaagggaaaattaacaaaaaccagactttaacttcatcttcctgctttttaactttttcttgtttctatatctgtgttattgtactgtctgtctagaaaagttgtcgttattgtttttgaaatgttcatcttttagtctttctactcgagatattagtagtttatataccacaattacagtgttatactattttgtgtttttctgtgtacttaatattaycattgagttttgtgctttcagataattccttgttttttttaatgccctcttctttcagattgaagaactccctttagcttttcttgtaggacaatwctggtgctgataaaattcctcagcttttatttatgtgagaaagtcttcatttctccttcatatttaaaggattttttgctggatatactattctaggataaaagtgtttttttttttccttcagcacattaaagatatcatgctactttctcttgacctattaggtttccgttgaaaagtctgctgccagatatatcagagcgcctttgtatgttacttgtttctttcctcttgctgttttaggatcctttctttacccttgatctttgggagtttgattattcaatgtcttgagatagtcttctttgggttaaatctgtgtggtgttctatagccttcttgtacttgaatattgctatctttcactaggtttgggaagttctctgttattgtccctttgaataaactttctatgcattaatatacatttctctccacctcctctttaaggccagtaactcttagatttgcccttttgtagctattttctagctctcttgtaggcatggttcattctttcttgttttttgtttgtttgttttgttttcttaatctccactgactgtgtattttcaaatagcttgtcttcaagctcactacttctttcttctgcttgatcagttctgctattaagggaatctgatccattcttccgtatgtcwactgcattgttcaactccagaatttctgcttgattctttttagttacttcaatttcttcactaaatttatctgataggattctgcattccttctctgtgttatgttgatttttttttaatttcctcaaaacagctattttgaattctctgtatgaaagatcacaaatctctgtttctttgggattggccccttgttccttatttagtgttcatgtttttggtgaggttatgtttccctggatgatcttgttgcttgtggatatttgtcagtatctgggcattgaagagttaggtgttgaytgtagtcttggcagtctgggctatttcccacccatccttcttgggagggctttccaggtatttgaggggatttgagtgttgtgatctaagtttttgttcactgatgtcacatctgcattggtgggcatcccacacctagtaaagctgtggttcttgtagacttgtagaggtatcatcttgttggtcttggataagatccaaaagaatttcctagattaccaagcagagattattttctcttcccttactttctctcaaacaaacaaagtctctctctctgtgctgagctgcctggagttgcaggagggggtgacacaagcacccctgtggccaccaccgctgggactgtgctgggtcagacctgaagtcagcacagcactgggtatcacccaaggcccatcattaccactacctggctactgcctatgttcactcaaggccctagagctctgcaatcatcaggcagcaaggccagccaggctgtgttcttcccttcagggtggtgagttctcttgagctctgctgtctggtagccagagcctggagtcagaaatcttagaaatctacctgatgctctgttctgctgtagtttaactgacacccaagccacaagacaaatccttccctctcttccccttttcatgggcagaggagtctctccccatggccaccatcaccactggcttattgggaatactgccaggcttccactgatgttcacttaaggccctagggctcttcagtcagcttgtgatgaatgcttcactctgagattcacccttcagagcagtgggatcctctatggccctggggaggtccagaaatgccatccaagagctaaggcctagaattggtaaccccaagagccttcctggtgctctagcctattgcagctgagctggtacctaacctgcaagacaaagttctgtttattaytccctctgattttcttaagcagaaaggccctctttctttgtagccataacagctgggaatgtgctgggacacacctaaattcagcatggccctcagtctcacaaaaggcccacaatgagtacttgcctgggtaccactgccaattatttagggcccaggggctcttcagtcagtgggtaatgaattctcccaggcctgggtccttcccttcaagtcagcaggctcccttctggctcagggtgtgtctagaaatgttatctgggagctagagctggaaagggggtctcagaactctgccttgtgatctcttctactgtggctgagctggtattcaagttgcaagacaaagtcctccttattcttcctcccctctcctcaagcagagaaaaggagtctctttccgagctttgagctgcactgcctagggttaggggaggggtaatgcaagtatacccttagctgccctggctggtgtctcactagatcacatgtcccttaagttcactggctctgagcccagcacagcaccagaacttgcctagaagttgcagtccttgtggcccaaactgcctttccagytttttaggaccccagagaactttagcccatggtggcaaggtttgctgaactgaagctacaatcactggggtgggcgattcccctctggctggggcttgtctaaataaatgtccccttcatgggtgccagctaagttctgtccagtgttggcactaagttccagtgcaaagtcctacaatcactgtgttcttcctccacgtgcacagattccgtctccgcaccatgtagccactgccaggggatgcaggaagggtggtgttggcaattcaagactgtctttcctatcctcttcttgacatgaagataaaacccaatacagtgatcactcacctgattttatggttcttataaaggcatttttttgtttagagagttgttaaatttagtgttcctgcagggaggaaaaycagtggaggcttctrtttggccatcttgctctgccttcatctcaaatgagcagttatacattttttcatcaaagtattcagcaaatgaagctccaagatgctctaaacttaggacattttagtaagttgatattgaacaaagaatgttgcaaatagtgaaactttgaaagaggcaagaacgaatcaaataaggagtgctctaatgctatacaatatacaaattctataattgcaatttataatgtttcaatttttgggaagaatcttttsatggagcaactattttataagatattatttttaatcagatacattttttgctatattagattggaaagaaacttaagagacctatgatcttgcaacatctaaatctggtgagacatttcaaagagtcatagagataacttacttgacaagtttcctcttgtaaagatgtttgttgaagcaaggagctctggacggaggcaaacagagcacctgtgaaacatttgagttgaaatatttcaacattttaatggaaaaaatagaactgagaataccctacatttgacagaacttgctctgagcatctgtagagatattttttctcgattaaagtttttgagttaaaaattttctgatctacaaagacaatcagtagaaggtattatgggctgaattatgtccctccaaaatttatatgttgaagtgtcaacctccactaccacagtgtgactgtatttggagatatggcttttaaagagataagtgaggtaatatgaggtcattttggtggtccttaatccagtacgattggtgtctttataagaagaggatgttaagacacagacacacacctagggaagactttgtgaagacgcgtggagaaggtggttgtctataagccaaggacagacgccttcagaagaaaccaactctaatcatggacttctagccctcagaattgtgaggaaataagtttctgttgtttaagcctctcagtctgaggtacttgttatggcagccctagtaagataaaatgggaggtaccagygtttttaaattgattaaccataaaaattaactttgaagaagattkcaggcaatattatttaaaaatttaattaataaaatcaaattgaaaaaactctattcttcagaaaaatgccagtggcacaatattagaaataaggccaagaaacgaattaaagtttgtgaatatgtagcatgaataattattcagaattctacagttttatttactgtacakatgtttatttttacattttagaaactatatttttggaaatagttttaatagaactattttgtagttatttttaaagaactacttattttgttttataagtccattagtacaataaaacactttttcaatcaaaaataaatatttcaaagatttcataattttaatgccccctttcaccctccagtgtgtctggctttggatgatgaatcacatgaagagactagaattgctgagtggacattccattattcattgaatgttctcataaacaatcagcagaaaaggaaaacccatatgtgcaccaagtgctagcccagccattttgtaaactaatgacaaaaagagaacgtgaatttaatttcttgtgaatctgacatactttgcatatatttcatggccattcaagtggatctggacaagggtttctcgattcccctgtgatgcttgcggtttgcactttagctctttgtatatgtgtctggattatcttcatyttcagaatccccacaccctgatggctccttatcttattgccctggctagtccagggaggaagataggctggagtcatccttggtattctcccagtcttctccccaacctccttcctgccgctttacttatgtaacaacagtactctgagcaagccctgtcctgagcactctgtgaacatgggaatcttcataacgaccctatgcggtagtcatggttcttacatggccactttccaggcgaggaaactgacggagacactaagagatttgaccaaggtcaaatagctcaaaaatgcatttcaaagttggctgtctggctccggcgtccaggatcttagcgcacactctgctgtcctttggcccaaccgcaactcgaggccacctctcattcctgcccaggcgccagcgtttggaccttaggacccagggaaagttgggtggagcaggtcaggtggcaccaccacaagtttcaggattccctctcttcaaagcaccccatccatgacgccgcccctggctgcctggccgcccccgctgcgcccccggccctctctactgatggatggagcatcgcccccaagcggtgacccaccggtgagtcccgggtggcctagggtaaggcggaccgggagccacctcacacccacacagcctgcgggaaggatccgacaaggtgagggtagccccgcgcggggccgcaacagcctattcctcccgtgtgtgacgaccccagccagagagaacccaacctgagtgccagcgagagcctgtccttggtcgctccgacccctcgccaggggatgtccggtaggaatagcactgagctgakgtgacggcgcggaggcgccaaaatctccacttagggcaatgaaaggtcatcggtctccctcttgccggcactgaaggaaccggcgrggtgcgacaaggtggggcggggcaaggaagcggatcttcatccatgtccctggatggagtaaggcacactctggaggtagcagcgagtttgaagtgtctaagaaaaaggccttctgcaattcacaattcktatggctacctgcacctttcatttacccactcaaagctaaaggtagccgacgtttttcaaaaactctggaggggcattcaacattttttaggtggcctgaactgccgaggaaaacaaatgctggccagattccaagtgaaatactgcasaggatcccccaaggcacgaagctggctggagggagctggagggagcgccccacctgccgcgggaaactcacgaggaaagtgcagaccttcggtggcgctggcacccgcgtggccctgattcctaagacgacttggcattggccactagggttctcttctctccagccagtacaggccaccactgtctggtcagggacagaagcggggcagtcaccaccgtctccagatgagcgacaccgggagtctttaaatctcccgactgagaagctctttgtgtccagatcggaggtgggcaagtctgtgrgaccagatgcccagacttgcccattgtcccccacccccaccccaatgacacttgcttctctcttgttctatctctagttcctcactccattactctgttgttttttcaaaaaatcgctatcagagtaatcctttggatgtgaccagttccatcagctgcagcagcatttcacaaaatgtttcaaataaccctagctttttgcaagctagtaacaaactaaacctgttttttgggaaatgctatcctatactcatgctgtgtgtgggccacaaatttggttttatatttctggtagaccagtgaaaaattagaaacaaaattaattacacaatttataatgtgcagaaaatcagagcaaaccaacaaggcaaactattttagattgaaagaccagaaatatacttccctccaggatttttattgccagaacactgcataatccaaggatcaacatcctcacagtaaacacaaaggcctatttttacatatgaatgctccctatagcatcccttaaaagaaagggagggcttaagtccaaaacgcaatcaatctttcaagacgaagatgccaaagcaattgcagcaaaagcaaaaattgacaaatggaatctaagaaaactaaagagcttctgcacagcaaaataaactgtcgacagagtaaacagacaacctacagaatgggagaaaagttttgcaagctatacatctgacaaaggtgtaatatccagcatctataaggaacttaaactaatttacaagaaagaaacacacaaccctrttaaaaaaccattaaaaagtgggtaatggacatgaatagaaatttctcaaaagaagacataacatgcagccaacaatcatatgaaaaaagctcaacatcactgatcattagagaaatgcgaataaaaatcacaatgagataccatctcataccagtcagaatgtctattattaaaaagtcaaaaaatgacagatgttagtgaggttgtggagaataaggaacagttacacactgttggtgggagtgtaaattagtttaatcattgtggaagacagcatggtgattcctaagacctaaagacagaaataatatttgacccagcaatcccattaccaggtattataccccaaggaacataaatcattctcttataaagacacatgcatgcctatgttcattgcagcactactcacaatagcaaagacatggaatcagccaaaatgcccaccaatgttaggctggataaagaaaatgtggtacatatacaccatagaatactatgcagccataaaaaaagaatgagatcggccaggtgcggtggctcatgcctgtaatcccagcactttgggaggccgaggcaggtggatcacgagttcaagagatcgagaccaccctggctaacacagtgaaacctcatctctactaaaaatacaaaaaattagctgggcatggtggcaggcacatgtagtcccagctactggggaggctgaagcaggagaatggcatgaacccaggaggcggagcttgcagtgagctgagatcacgccactgcactccagtctgggcgacagagcgagcctccatctcaaaaaaaaaaaaaaaagaaaaaaaaaagagaatgagatcatgtcctttgcagggacgtggatggagttggaggccattatccttagcaaactaacacatgaatagaaaaccaaatacctactacatattctcacttacaaatgggggctaaatgaygagaacacatggacacatagagggaaacaacacacactgggacctatcagaggctggagagtgggaggtagaggatcaggaaaaataattaatggatactaggtttaatacctgggtgatgaaataatctgtataacaaacccctatgaracatgtttgtctatgtaacaaacctgcacatcttgcatatgtatcccgggacttaaaagttaaaaaaaatgcaatcaatcaaagcaaacctatgggacgcttatataaaaggcaggtttcagctttctactgatctctctagagcgatgttgtacaatatggtagtcaytagtcacaggtggctactgagcacttgaaatgcgaatagtccaaactaagatgtattataagttggaaatgcacgccagattttgaatattttctagaggggaaaaaaagtaaactatctcagtaatttttatattgatcacatgttgaatgatatatattaggtatactagattaaataaaatatattattacattagtttcacttgtttctttttacttttctagatgtggctttttaaaaaatttagagttccatatgtggctcccattatttttctattggacagagctgcaatgtttcttgaactatatactctaagatatcaatatatatactatatatgacaaaagggtttcatagtttaataatttggaaagcactgcctactatattccttcgtcttgtgttctgcagggtaacctgagattttggggaaaaatttttatggattaaatgtatttgggatatgccagttaagaacggaggacttagaactctcaatgtaatgtgaattatgattttctaagagaggcatcttatatacagtatttctccaacacactcaaagaacgcttttcatcataaacacaacccccattaatacaattctgaaggagagtttagggaactggagtagaagataaagctcataggccttactttgcttcatatatctgttgtatggctcaaggcttgcattgtaagtcttttctctagcttttccctcaactaatagctagactagtattttcaccagatactggtgaagtcctcaccccagacgtaatcaatcagacccttggagatcacccttttgtgttagttaagccttgttgtgtaagaaactaccccaaaatataatggtttaaagtggcaacaatttaacacgctactatatggataaaccttgaggacatcatcctgaatgaaataagccagtcatgaaaagacaacagtgtatgattccacttttatgagagatctagactagtcagtataatggaaacagaaagtagaatagtggttgccaggagttggggagtggaggaaaattgggagtcatttgatgggtacggagtttccgttttgcaaaacaaaaaccgaaagagttagttgttagaaaaagtcctagagatctgttacacaacaatatgattatagctaacactactgtacacttaaatatggttgagagtgtacatttttattgtgttttttaaccataatttcagaaaattaaaaataaggtaaaatcaaaacagcaacaatttatttagctcacaattctgtgggccagcagtttgggctgggatgagccaagtacttctggtcttggcggctgggcttactcatgcatttgtggttggctggcagtcaactagtgggctctgcttctgggggttgcctggctgtcagctgaggccattgggagtgactggccacatgtttctcattgtccctcaggctaactctggtcacatgacaataacagctttccaagagtatgagcaaaagcctcatggcctcttcagaactaggtttagaactcacacaatgttactctagctgtgtcctattagtcaaagcaaataacaaggctagcccagattcaaggggtgagctaagcaactcctgatacaaggcgctaaaaagcactgtgactatttttacaattgtccacacttgtcctgcatcccattttctagaataatccattttcttatattttatatgagaaaatttcctgtttcttatattttatatactcagaagcatactactcttttgtgcatcactttcttttactttctcagacactctttcatctcatcagcatatcagaagtattttattctttttagtggtgaatttttgcattatcattttgctgggcttgcctcactcccctgtctctccattatctttgctgtatctcaatgctaaatgctaaatattataaaaacaatcttctctaaaagtgtctccttgactttctccctctgcctctaacaatttccttgggaatcctaaaatccagatgcctggctgtccactccttaggctgggttccttttcacttgctgtagtagttattatgggctaacttgccttgtaatgtttgactcactaggtcataagtttttatttacttatctatctgcaccagtgatggtaagccctgtgtcttgtttacttgtatagccaagcactcacaaggtacctgacacaatataggcattcagtaggtaattattaaataaatgaataaacattaattaataaataggttgatgtaggtgcattcccaaggtgtttactgcaaactacaccatctaactataagatcccctataggggattccctgtaggggatgggaattgcacctcttctctttcttccttctagcttgtgactcatcttttactggaaggataccttcttttaatatctcctayctgatttcccatatgcaaatcaacactctcagctttcatgtgttcacaccatgagtaccatctgccagactctatctctttattagagtatttctcctctatatgtgctttaactgatgagagtgctctagaaacaagagcccctcccccatcattccttcatatgcacttgaaaagaatatgactgtgtaaaagtgtatattgtgtaaatttttgtgtaatgtttatatatgtcaattaggccaaatattaataacatgctcaggtctagacacttactgacttttttctttgttctgttactgtgagaggtattagaagtctcctactatgattgtagactggtcttttctccttttagttctggcaatttttgctttccatattttgtagctatgttcatgagtacatagagattaagagtttttatatctccctgttagattgacacttattgttataaaatgtctttatctctaggaatgcttcttgttttaaaatctactttgtctgatatcaatatagctatacctactttcttttggttagtgattgcatagcatactttttccatccttttattttaatcttgctgtgtcactgtcatatttttcttaaaagtagcatttacttgaatatttttaaaaaagaaaacacatcagtaatctttgactaataaatggagtatttagcccatttatatttaatgtaactactggtatatttctggtatatttaagtaactttcccaaagccacagcatgttagtgggagagtgcacactaggcatttcctgactttcaagtccaggatgctttctcattcattacctcagacttgggttaaaggctgtatttcccaccctcacatctgcttctgccactgctgtaatatttagtccttcaagttccttcagagatataggcggcaccgctctggaatcttagcctgattccagaataaaggaatgttaatagccctctgtgagctttccaggrgcccacacaataaggttggtaggctttcaaagaaatcagttccattagtgaagtagcacaaacaattgtgaatttccttgaactcacctgaaagccttaagatccaggagtaaattcagggtcaggaccttgatgccatactacaggttgagaacccaaaacatatctaaggtaggactgaatctaggacccacagccaccagcaaagaactacctatgctatattgctagcactccctagctcacctattttacttttttttttttttttttttgagaccgagtctcactctgtcacccagactggagtgcagtggcgttatctcagctcactgcaacctctgcctcctgggttcaagtgattctcatgcctcagcctcccaagtagttgggactacaggcatgagccatcacacccagctaatttttgtattttcggtagagacgggatttcaccatgttggccaggctggtcttgaactcctgacctcaggtgatccacccgcctcggcctcccaaagtgctgggattataggcatgagccactgcgcctggcctattttacttttaagaacaaggaaggctttaagcattctaaaacacaactagggaggcacaggagaaaacagtggtgatctgggaaagctggagtacaagatgaatgaaaccacttaccttcctgcaggtgctcctaacgtacacagtgcctcagtgcctctgtcttatggctatgagctttacagcaatctttctcaaactgcaaaaaggcctaactaaaatccatcttgcaattcctagcacttgcgttaaggtaggcagcatgtctacacatccttctgtaggatgtaggtttaaaaatatcagaagattttttacccaaaagatgcccttgtgccagcctgctttttcatgtgtaaaatacaacaattactgctactaaaattaatttatttggtgctcagtgaatgtttatttagaagccctattttgcataggaaatagactttaggtacaacatgggaattaacatgggtttgagtagtattgggtttttttggaggactggtattcttaaggaatttttaaacagaagataaggcacatgtgcaaatagtctataatgattattatttgtggagtgtttattatgcacctgattctttacaaatatttcatttaatgcttacaactgccatgcaaagtaggcatttgtatcccaattttacaaattaggaaactgagattaaggaactgtcccaatttctcaaaccaaatgaacaatggaaagaatttgaacctcaatggtagaaagaatttgaactccaatatgtgtggctttttccactggttccacatttcttccctaccaatggttcataaaaagaagtagtgagttttccaaatggtacaaacaaaataccagagaagtagaggtgaggaaggtagtcacttccaggtgtgatgattggggaaggggtcatgggggaaagccactgaggtgggcctttaatggagtgggaggtgggtacaggaggacwatattctatattctagacagagggaatggcctcagcaggagggtgaagatgagaccatttttgagtgtggagaacagtataacttaatatgcaagatttatattgagaggctagcagaaggcaaggcggaaagttaaattgaggcaagattgcagagtcgatgacaggcgaaggagaaagaactctatgaggcaataaggagctgttaaactctgccccccaactccagggatttggagccatatacagaaaagatctagaagaaaaagaagggagctacagtgcactgtcacagtgctgaactctgacagaagtggcggcggggaatggaattgatgattccaaggagaaggggaactctaagaccaaagagaagaggactatagatttcagtgaccaatgggttttggagagtagaagaaatgtatgaatcacaaaaactatagtggtgagagcctgggtgatcaagagaactttggaaccacacacggaaatgtgggcaacaggaagaggtgctggcttaggggaaagaaccacctggaaagtgtcagccacacagggtctgtggtcaggtatgttacaccgggggccctggggcaggctgaatccgaggaagtatcacaaaggaaaggagcttcctgagaagagaagaaccaagtgaaggccacttcaggggtagagggctgggaaagggtaggagaaataggagtagaaaaatcaacagaaggaaaagaggtaatgaatttggggtcaaaaagacagagtaggtaatgaccctctatagactttgcttaaggaggaaactttgttcttacaatgagtgaatgaatgactgcaaagaataaatgaatgcaaagttactcaatgcttccatctgacaaagagtgcgtgaaatagccaatcagttgcttcactatccaaatggagaatatagcccactatacataagccattttgaattatataagctactccataatggagcttattagtgtggttcccgggcttgagcccaatcttttcttcttgtgaaacgaaatcaagatagtattgtttccctgtcaataatgggttcttaaatgggcttgagctttgtgagcactgccaatatcaacacttactttagaggcaatcttgataaaggagaatctgataaggcacaagagagggcaaagagggtataaatggcaggttggatgagggacactaccactgaggcaacatggccaagctcacccttctcactggtaagagatcgtctcatctctgtacctctgaatgactctctccatcttgtttttctgcccctttaaaactcttttaccttcaaatttaaaccagatcaactgagatttttgctttcggcaaaagtatggggatgtactgaacagggggacagccccaaattgcctggtgataggtttctcactgccctgctgtccccctcccttcaccaagcctcaaaggctcatggtactttaatggtcttttgaatggaaatagaggggagtgggtttccaggacaaatccaaaggctttgccagcctcagtaggttggtcatctacagaggatcttaagagaatgaaaaatagaaaaagcttcctactgcttaagtgaggtgactaatgtataaaggctactctactcacattcctccagttcattattctctctgttgctttaaggtctgctccttgtgctgacagctgaaataggtaggtatatttcttgggatgaaccactatattgttcctctttttcttattcataatttggaaactcagtactgccctgtgtccttccacatcagacaaagaatattaactactctctacagagtttgaaattccctaaccaagtttaaaggattgataccattggcctaaaaatcccaaagcagaaaccaactagatggcagtcttaaagaatacgtgctaacaataaaaactaatgtggtgaggcagctacacagtgtcctctgctcttaaaacattttaaaatctgtcatcttactgagttttaaaacaactcttctttgagaggtgtacaggaaaggcattaccactccatctcacagaccagttaaccagggcagagataagacatatgacctgacctaggtaatacagagagttcatggcagaatctgaaccagtagccagggcccttgtctcttggtggaagactcatttccccctgggtggaattactcagggagatatccaaaagggctaaataggcttatactatcatcctttctgtgtctcagtttccaaatgggttaaaatgagaaaataataatacctctctcaaagggttttggtgaggattcatgagtaaatataagtaaatttctcagagcaatgcttggtacgtaagctgccacataagggagctagaatacatctaaatcatagttcactaagctttaaaattctatttcagctaaaggcactggtttctaaggttatttaattctctcttggaggaacagagctatctctaagagatatcttcagccctgaattgcctgctcattattgcctgcaaattatataattataggtttgctgcaacataaagttcttacattgacttttcccctttcctttgagacttcaaatagggaaatcatttggaaatctgtggtttttaaagaaatctgtgactcactagggagcttgtctctcaccttctttctctgggtaacaggctctgcctaccagctgacatgttacttcaccaactgggcccagaaccagccaggcctggggtgcttcaagcctgatgacatcgacccctgcctctgtacccacttgatctacgcctttgctggaatgcagaacaacgagatcaccaccatcgaatgggatgacatgactctctaccaagctttcaatggcctgaaaaacaagtaaatgacggaaaacctgagtttcaaatcttttaacctttaaggacagtttaaacaagatcttccacagcagacttcaggctgaaattccaaacaggccaacaagcaggtaaattcagctttcttattatttcaagtgcaagaatgactctaattttaaggggaatggctggctcacagaagctagctgctaactaaagcccagctcagttgccaagggaagcttataagtccaactactggtggactcagttgagaacaatcttccacttagaagcaatccaaagctggcattgataaagcattcagtctccttggtcaggagattcactcctagggaaataattggaactgtggagacattggggtgcagcaaaccaacatggcacatgtatacctatgtaacaaacctgcacattgtgcacatgtaccctggaacttaaagtatatttaaaaaaaaaactgtggagacattgaaacataccaatcatagtcacctactccaacattcataagtaggaaataaggataagaacaaagataaaccaggatgagaggctgcatgacactttcctggcttcttgctcactattgcagctaaatgttgaaatggcttccctttcttttcatttgttctggtaaaacactttgtttcttttccctcagaaatagtcaactgaaaactctcttggctattggtggctggaactttggcactgctccgtaagttctttttggtgatgacttcctaggttgattttactctaaggtgttgggaccaccaaggtctcaccctgccttctttgggtctccctcagtttcactgccatggtttccactcctgagaaccaccagactttcatcaactcagtcatcaaattcctgcgccagtatgagtttgacgggctggactttgactgggagtaccccggctctcgtgtgagccctcctcaggacaagcatctcttcactgtcctggtgcaggtgagctaagttccagatcattttcactggaaagcatacacccatctcatatgaaagatcactgggaccttaaacctagtttcctagaattttatttggggtgaaggacctgaaaatcctattccagtaaggatgctgaggaatgaatggaaggatggaagaggttaatttaattcagtgtcatgaacctcatgaaagtaaacttaaagttactattcacagactttctcctgctcctgtacaggaaatgcgtgaagcttttgagcaggaggccaagcacattaataagcccaggctgatggtcactgctgcagtagctgctggcatctccaacatccagtctggctatgagatcccccaactgtcacagtgagtgatgtgccttatcttcaaacccctggaggtatcactcaggcagactagacttgtctttggtctgtcttgctattcagggaccttgtttaggaggctatggaagtggtgccttgtgcccgcacaggtatgggaaatgaccatcagaatgactttaaatcctctaccccacctcaggtacccggactacatccatgtcatgacctatgacctccatggctcctgggagggctacactggagagaacagccccctctacaaatacccgactgacaccggcagcaacgcctacctcaatgtggtgagtccctgtacagatgcaagagcagaccagagatgatgatgaaaatcacatagagattcaggcacaaaaggcatcataagtttagtggttttctcaaatgagaaattaggctgccataatcaattaaatattctcatttactaaaaaacttgcctatttattaacaccatactgataattttacctaatatgaaagaagattaataacaagtgcattgttttttaataaaagaaaatgatatgccactgctcctatttcaataaattataaaaggctttttccaccttcccccttttgctgtttcccttttgccttacccattttctactgttctaatcccttgcctatgtatatcatatagaatttcggacattaactaatgaatcataccaggaatatcattttaaaatctctgctcttctatcatattttttttatccaaagggtatatgtaaagcctgcttgttattaaaagaatttagttgagaattagacctatcactttaacagatatatgtcagtgatgctctaaaatatgttgcaagtactttgtacagtgggcacaaccaaatcaaaaaaagtttagctaataattaatcactaggccatcagctgtgggtgagaactctagctaacccactgccattgcaggattatgtcatgaactactggaaggacaacagggccccagctgagaagctcatgttggattcccagcctatggacactccttccttctgagcaacccctccaaccatggaattgatgcccctaccactggtcctggccctgctggaccctataccaggcagtctgggttctgggcctactatgaggtatacactcagaaatgttagaggaaatgtggctttctcttggtccatgtagctaataatatgagcaatatgcaacagttcttggattggagctgaaagtggatgtttgtggctatctagaagggaggcaagataaaccctcctgttgcaccactttaattgggccttcactaggtccctttgaggctagattccaaacacagagagtgtaggaaagtaggctaccattagtgagagtatatcaatctgtagacacttctgactgccagggtattccttgatttaagagtttctccccacattgaaaataaattactcaaaaggagtaaacaaacagaatcccaaataactaagaaatttgctggtaaagcaatagaccttcattttcaaggagtttttatgcaacactcctctacttccccttccccatgtccttttacctctgccaccacaaggacactgcctacctcttgacctgtaccttatattctgttagatctgtaccttcctgaagaatggagctactgaagtatgggaggcttctgaggatgttccctatgcctacaaaggaaatgagtggcttggatacgataacaccaagagtttccaaatcaaggtagactgtgttctatgggttgttgttgcctgtgagcatgttcccattatagccctggagccacagctcagccttggtgtctgtacataactgacttcctttctaattaccacaggcagattggctaaagaagaacaactttggaggtgccatggtctgggccattgacctggatgatttcacaggcactttctgcaaccaaggaaaattccctctgatcaccaccctgaaggatgctctgggcctgcagagtacaagtgagttagggagtgag

SEQ ID NO: 94032 - DNA, 37292 bp, Homo sapiens
  misc_feature (1)...(37292): n = A,T,C or G
ggctgatctcaaactgtggcctcaagtgatccacctacctcagcctcttgagtacctgggactacaggcacgcaccaccatgcccagctaattttttttatttttagtacagacgaggtcttgctatgtttctgaggctggtctcaaactcatggcctcaagcaaccctccccacttggcttcccaaagtgctgggattacaggtgtgagccatcatgcctggcctattttattttttcattattgaaagataatatgccagacacagtggctcatgtctgtaattccagcattttgggaggccgaggctggaggatcactttggacccagagcttgggactatctgggcaacatagcaagaccccatctgtatgtctattaaaagtaataaaaagaaattatattatattatattatactaatttgcatgaatccagtgtggatgaaaggtagtaagtgaggttgggggtggggcacctagggcccatgcccagccctaatttttatattttatatttcttgtagagatgaggtttctcgctattgctcaggctggtctcgaactcctggtctcaagtgatccaccgccccttggtcccctaaagggctgggattacaagcatgaaccaccatgcctggccaatctatttattcttgagtgagcttttctagtttgtgtcttccagagaatttgttcatttcatctaagttgtcaaatttattggcatgaagttgtttacagatctccattttaacatctgtagaatctgagagccctggtagttttcttcatgtgtcttgtgtttggagttgttgaattttttggagctgtgggcttatagtttttatcaagtttgaaaatttggggccattctttcttcacatattttttagttacccctttttctccttgcctttagggactcctatatattaggctgcttaaagttgtcccaacacttactgataatctttaaaaaaaaatttcttttttttttgagagaggatttcattccattgtccagactggagtgcagtgatgcaatctgagctcactgcaacctccgcctttagggctcaagcagttctcctgtctcggcctctcaagtagctggtactacaggtgcatgccatgatgcccagcaaatttttgtattttttgttgagatggaggtttcatcatgttgcccaggctggtctcgaactcctgggctcaagtgatctgcctgtctgggcttcccaaagtgctgggattacaggtgtgagccactgcacctcacccttaaatttttttttaattctttttttttttttttttgagatggagtcttgctccgtcacccaggctggagtgcagtggcatgatcttggctcactgcaacctctgcctcccagttcaagtgattcttctgcctcagcctcccgagtagctgggactacaggtgtatgccatcacacccagctaatttttgtatttttagtagagacagggtttcactatatttgccaggctggtctcgaactcctgaccttgtgatctgcccgcctcggcctctcaaagtgctgggattacaggcataagccaccgcgtccagatcattttttctttacgtctttcagtgtggatagtttctattgccatcccttcacatcattatttattttcttcttcaatgtctaatctgtccttaatcccatctggtgtattttttttatctctagaagttctgtttgtttatatacacatttttccatgtttctattggattattgcacatatggaacagttatagaagctattttggactggatgcggtggctcatacctgtaatcccagcactttgggaggctgaggcagcaggatcccttgaggcccagagttcaagagcagcctgggcagcatagtgagacccctgtctctacaaaaaaaaaaaacttttaaaaaactggctaggtgtggtgtctcatgcctgtagtgccagctactcaggaggctgaagtggaagaattgcttgagcccaggaatttgaggttgcagtaagctatgattgccccactgcactccagcctgggcgatacagagagacactgtctcttaaaaattaataaataagtccggacgtggtggttcatgcctgtaaacccagcattttgggaggccgaagccagcagatcacctgaggtcgggagttcgagaccagcctgaccaacgtggagaaaccccatctctactaaaaatacaagattagttggggtgtggtggcgcatgcctgtaatcccagctactcgggaggctgaggcaggagaatcacttgaacccagaaggcagaggttgtggtgagccaagatcacaccattgcactccagcctgggcaacaagagcaaaactacatctcaaaaaagaaaaaaaaaaatagctggacacggtggcaggtgtctgtaatcccagctactcaggaggctgaggcaggaggattgcttgaacctgggaggcagaggttgcagtgagcagagatcgcgccactgcactccagcctgggcaacagagcgaggctctgtctctaaatacatacatacatacatgtatacatacatacacacacacatactacttaaatgcctttctctgaagattcttatgtcctgtgtccattactgggtaggtttccataggttgnnnnnnnnnnnnnnnnnnnnnnnnnnnnnnnnnnnnnnnnnnnnnnnnnnnnnnnnnnnnnnnnnnnnnnnnnnnnnnnnnnnnnnnnnnnnnnnnnnnnnnnnnnnnnnnnnnnnnnnnnnnnnnnnnnnnnnnnnnnnnnnnnnnnnnnnnnnnnnnnnnnnnnnnnnnnnnnnnnnnnnnnnnnnnnnnnnnnnnnnnnnnnnnnnnnnnnnnnnnnnnnnnnnnnnnnnnnnnnnnnnnnnnnnnnnnnnnnnnnnnnnnnnnnnnnnnnnnnnnnnnnnnnnnnnnnnnnnnnnnnnnnnnnnnnnnnnnnnnnnnnnnnnnnnnnnnnnnnnnnnnnnnnnnnnnnnnnnnnnnnnnnnnnnnnnnnnnnnnnnnnnnnnnnnnnnnaaacttcccaagtacttaagaaattccataaatctaacaaattaaatgtatatatttttaaaactttcccacacatagattgttctacgggtctaattaaatgtttacgtgtgttgaaccttaagttctcttaaatgttttaacagtttacaatcttagcaatgttctaatggaaaatcacaaatctaaatcaaccactcacttatatatttcaaatagcaattacaatgttggcttttttttttttttttgagtcttgccctgtcacccaggctggagtacagtggtgtgatcttggctcactgcaacctctgactcccagattcaagcaattctcctgcctctggctcccaagtagttgggactacaggtgcacatgccaccatgcccagctaatttttgtatttttagtagagacagggttttgccatgttggccaggctggtctcgaactcctgacctcgtgatccacctgcctcagcttcccaaagtgctgggattacaggcatgagccaccacgcccagtcagttggcatgttattctaataggtcatattctatcttttaaaaaatatttatttattcattttagagacaaggtctcactctgtcaccccggctagagtgcagtggtgccatcatagctcattatgaacatgatctcctgggctcaagtgatcctcctgcctcagcctcctgggtagctgggactacaggcatgtgccaccatccccagctaatttttataaaattttgtagagacagggtctcactctgtcacctaggctggagtgcagtagtgcaatcatagctcactgtagccttgacctcctgggctcaagcgatcctctccccccagcctccaaagtgctggaactacgggcacatgccacctgcacaatttgacattgctggacctcctccaggctggggagcaaatcccctgtaccatcttcttgctttactttctggggcagggtcctgatggctgatttctaactaaaatcagcaggctggttcaggggccagggactttccagggcagggagtagagactcagagtcttcaagagaatgaaggaagatcatggctctgggatactaactcccctttgtctctttcagacctcagtgtgaacagggctgtgtgggatggaggagggtgcatctcccaaggggacgtcttgaaccgtcagtgccagcagctgtctcagcacgttaggacaggtaaggcaacagactccaagatctatctgggaaggtggctcacctgcgaaagggctagagcgacccctgccaggctggtgaagctgccatattttacagtgtgtgacggcttgagatctggggccaggaattacaaggcagatgtggaatcacccaggcagggactgtggaggaaaggggtcgagttcaattcctaactgcatagaagggaaggcaggagagactaacacactggagaaactaattccacttcttcctgaaaacggatgacatcccttatctgaacacattttcagtaaaaagcccaactacaacaatcactcctgacatacagaaccctaagaaacttctaaacaaaatatcattgtatcttaaacaggttctgcggcaaacaccgccacaggtacaacatctacaaatgtcgtggagccaagaatgtatttgagttgcagcaccaaccctgagatgacctcgattgagtccagtgtgacttcagacactcctggtgtctccagtaccaggatgacaccaacagaatccagaacaacttcagaatctaccagtgacagcaccacacttttccccagttctactgaagacacttcatctcctacaactcctgaaggcaccgacgtgcccatgtcaacaccaagtgaagaaagcatttcatcaacaatggcttttgtcagcactgcacctcttcccagttttgaggcctacacatctttaacatataaggttgatatgagcacacctctgaccacttctactcaggcaagttcatctcctactactcctgaaagcaccaccatacccaaatcaactaacagtgaaggaagcactccattaacaagtatgcctgccagcaccatgcaggtggccagttcagaggctatcacccttttgacaactcctgttgaaatcagcacacctgtgaccatttctgctcaagccagttcatctcctacaactgctgaaggtcccagcctgtcaaactcagctcctagtggaggaagcactccattaacaagaatgcctctcagcgtgatgctggtggtcagttctgaggctagcaccctttcaacaactcctgctgccaccaacattcctgtgatcacttctactgaagccagttcatctcctacaacggctgaaggcaccagcataccaacctcaacttatactgaaggaagcactccattaacaagtacgcctgccagcaccatgccggttgccacttctgaaatgagcacactttcaataactcctgttgacaccagcacacttgtgaccacttctactgaacccagttcacttcctacaactgctgaagctaccagcatgctaacctcaactcttagtgaaggaagcactccattaacaaatatgcctgtcagcaccatattggtggccagttctgaggctagcaccacttcaacaattcctgttgactccaaaacttttgtgaccactgctagtgaagccagctcatctcccacaactgctgaagataccagcattgcaacctcaactcctagtgaaggaagcactccattaacaagtatgcctgtcagcaccactccagtggccagttctgaggctagcaacctttcaacaactcctgttgactccaaaactcaggtgaccacttctactgaagccagttcatctcctccaactgctgaagttaacagcatgccaacctcaactcctagtgaaggaagcactccattaacaagtatgtctgtcagcaccatgccggtggccagttctgaggctagcaccctttcaacaactcctgttgacaccagcacacctgtgaccacttctagtgaagccagttcatcttctacaactcctgaaggtaccagcataccaacctcaactcctagtgaaggaagcactcyattaacaaacatgcctgtcagcaccaggctggtggtcagttctgaggctagcaccacttcaacaactcctgctgactccaacacttttgtgaccacttctagtgaagctagttcatcttctacaactgctgaaggtaccagcatgccaacctcaacttacagtgaaagaggcactacaataacaagtatgtctgtcagcaccacactggtggccagttctgaggctagcaccctttcaacaactcctgttgactccaacactcctgtgaccacttcaactgaagccacttcatcttctacaactgcggaaggtaccagcatgccaacctcaacttatactgaaggaagcactccattaacaagtatgcctgtcaacaccacactggtggccagttctgaggctagcaccctttcaacaactcctgttgacaccagcacacctgtgaccacttcaactgaagccagttcctctcctacaactgctgatggtgccagtatgccaacctcaactcctagtgaaggaagcactccattaacaagtatgcctgtcagcaaaacgctgttgaccagttctgaggctagcaccctttcaacaactcctcttgacacaagcacacatatcaccacttctactgaagccagttgctctcctacaaccactgaaggtaccagcatgccaatctcaactcctagtgaaggaagtcctttattaacaagtatacctgtcagcatcacaccggtgaccagtcctgaggctagcaccctttcaacaactcctgttgactccaacagtcctgtgaccacttctactgaagtcagttcatctcctacacctgctgaaggtaccagcatgccaacctcaacttatagtgaaggaagaactcctttaacaagtatgcctgtcagcaccacactggtggccacttctgcaatcagcaccctttcaacaactcctgttgacaccagcacacctgtgaccaattctactgaagcccgttcgtctcctacaacttctgaaggtaccagcatgccaacctcaactcctggggaaggaagcactccattaacaagtatgcctgacagcaccacgccrgtagtcagttctgaggctagmacmctttcagcaactcctgttgacaccagcacmcctgtgaccacttctactgaagccacttcatctcctacaactgctgaaggtaccagcataccaacctcgactcctagtgaaggaacgactccattaacaagcacacctgtcagccacacgctggtggccaattctgaggctagcaccctttcaacaactcctgttgactccaacactcctttgaccacttctactgaagccagttcacctcctcccactgctgaaggtaccagcatgccaacctcaactcctagtgaaggaagcactccattaacacgtatgcctgtcagcaccacaatggtggccagttctgaaacgagcacactttcaacaactcctgctgacaccagcacacctgtgaccacttattctcaagccagttcatcttctacaactgctgacggtaccagcatgccaacctcaacttatagtgaaggaagcactccactaacaagtgtgcctgtcagcaccaggctggtggtcagttctgaggctagcaccctttccacaactcctgtcgacaccagcacacctgtcaccacttctactgaagccagttcatctcctacaactgctgaaggtaccagcataccaacctcacctcccagtgaaggaaccactccgttagcaagtatgcctgtcagcaccacgctggtggtcagttctgaggctaacaccctttcaacaactcctgtggactccaaaactcaggtggccacttctactgaagccagttcacctcctccaactgctgaagttaccagcatgccaacctcaactcctggagaaagaagcactccattaacaagtatgyctgtcagacacacgccagtggccagttctgaggcyarcaccctttcaacawctccyrttgacwmcagcacasctgtgaccacttctgctgaaaycagttcctctcctacaaccgctgaaggtaccagcttgccaacctcaactactagtgaaggaagtactctattaacaagtatacctgtcagcaccacgctggtgaccagtcctgaggctagcacccttttaacaactcctgttgacactaaaggtcctgtggtcacttctaatgaagtcagttcatctcctacacctgctgaaggtaccagcatgccaacctcaacttatagtgaaggaagaactcctttaacaagtatacctgtcaacaccacacyggtggccagttctgcaatcagcatcctttcaacaactcctgttgacaacagcacacctgtgaccacttctactgaagccygttcatctcctacaacttctgaaggtaccagcatgccaaactcaaatcctagtgaaggaaccactccgttaacaagtatacctgtcagcaccacgccggtagtcagttctgaggctagcaccctttcarcaactcctgttgacaccagcacmcctgggaccacttctrctgaagccacttcatctcctacaactgctgaaggtatcagcataccaacctcaactcctagtgaaggaaagactccattaaaaagtatacctgtcagcaacacgccggtggccaattctgaggctagcaccctttcaacaactcctgytgactctaacagtcctgtggtcacttctacagcagtcagttcatctcctacacctgctgaaggtaccagcatagcaatctcaacgcctagtgaaggaagcactgcattaacaagtatacctgtcagcaccacaacagtggccagttctgaaatcaacagcctttcaacaactcctgctgtcaccagcacacctgtgaccacttattctcaagccagttcatctcctacaactgctgacggtaccagcatgcaaacctcaacttatagtgaaggaagcactccactaacaagtttgcctgtcagcaccatgctggtggtcagttctgaggctaacaccctttcaacaacccctattgactccaaaactcaggtgaccgcttctactgaagccagttcatctacaaccgctgaaggtagcagcatgacaatctcaactcctagtgaaggaagtcctctattaacaagtatacctgtcagcaccacgccggtggccagtcctgaggctagcaccctttcaacaactcctgttgactccaacagtcctgtgatcacttctactgaagtcagttcatctcctacacctgctgaaggtaccagcatgccaacctcaacttayastgaaggaagaactcctttaacaagtataactgtcagaacaacaccggtggccagytctgcaatcagcaccctttcaacaactcccgttgacaacagcacacctgtgaccacttctactgaagcccgttcatctcctacaacttctgaaggtaccagcatgccaaactcaactcctagtgaaggaaccactccrttaacaagtatacctgtcagcaccacgccggtactcagttctgaggctagcaccctttcagcaactcctattgacaccagcacccctgtgaccacttctactgaagccacttcgtctcctacaactgctgaaggtaccagcataccaacctcgactcttagtgaaggaatgactccattaacaagcacacctgtcagccacacgctggtggccaattctgaggctagcaccctttcaacaactcctgttgactctaacagtcctgtggtcacttctacagcagtcagttcatctcctacacctgctgaaggtaccagcatagcaacctcaacgcctagtgaaggaagcactgcattaacaagtatacctgtcagcaccacaacagtggccagttctgaaaccaacaccctttcaacaactccygctgtcaccagcacacctgtgaccacttatgctcaagtcagttcatctcctacaactgctgacggtagcagcatgccaacctcaactcctagggaaggaaggcctccattaacaagtatacctgtcagcaccacaacagtggccagttctgaaatcaacaccctttcaacaactcttgctgacaccaggacacctgtgaccacttattctcaagccagttcatctcctacaactgctgatggtaccagcatgccaaccccagcttatagtgaaggaagcactccactaacaagtatgcctctcagcaccacgctggtggtcagttctgaggctagcactctttccacaactcctgttgacaccagcactcctgccaccacttctactgaaggcagttcatctcctacaactgcaggaggtaccagcatacaaacctcaactcctagtgaacggaccactccattagcaggtatgcctgtcagcactacgcttgtggtcagttctgagggtaacaccctttcaacaactcctgttgactccaaaactcaggtgaccaattctactgaagmcagttcatctgcaacygctgaaggtagcagcatgacaatctcarctcctagtgaaggaagtcctctactaacaagtatacctctcagcaccacgccggtggccagtcctgaggctagcaccctttcaacaactcctgttgactccaacagtcctgtgatcacttctactgaagtcagttcatctcctatacctactgaaggtaccagcatgcaaacctcarcttatagtgacrgaagaactcctttaacaagtatgcctgtcagcaccacagtggtggccagttctgcaatcagcaccctttcaacaactcctgttgacaccagcacacctgtgaccaattctactgaagcccgttcatctcctacaacttctgaaggtaccagcatgccaacctcaactcctagtgaaggaagcactcsattcacaagtatgcctgtcagcaccatgccggtagttacttctgaggctagcaccctttcagcaactcctgttgacaccagcacacctgtgaccacttctactgaagccacttcatctcctacaactgctgaaggtaccagcataccaacttcaactcttagtgaaggaacgactccattaacaagtatacctgtcagccacacgctggtggccaattctgaggttagcaccctttcaacaactcctgttgactccaacactcctttsacyacttctactgaagccagttcacctcctcccactgctgaaggtaccagcatgccaacctcaacttctagtgaaggaaacactccattaacacgtatgcctgtcagcaccacaatggtggccagttttgaaacragcacactttctacaactcctgctgacaccagcacacctgtgactacttattctcaagccggttcatctcctacaactgctgacgatactagcatgccaacctcaacttatagtgaaggaagcactccactaacaagtgtgcctgtcagcaccatgccggtggtcagttctgaggctagcacccattccacaactcctgttgacaccagcacacctgtcaccacttctactgaagccagttcatctcctacaactgctgaaggtaccagcataccaacctcacctcctagtgaaggaaccactccgttagcaagtatgcctgtcagcaccacgccggtggtcagttctgaggctggcaccctttccacaactcctgttgacaccagcacacctatgaccacttctactgaagccagttcatctcctacaactgctgaagatatcgtcgtgccaatctcaactgctagtgaaggaagtactctattaacaagtatacctgtcagcaccacgccrgtggccagtcctgaggctagcaccctttcaacaactcctgttgactccaacagtcctgtggtcacttctactgaaatcagttcatctgctacatccgctgaaggtaccagcatgcctacctcaacttatagtgaaggaagcactccattaagaagtatgcctgtcagcaccaagccgttggccagttctgaggctagcactctttcaacaactcctgttgacaccagcatacctgtcaccacttctactgaaaccagttcatctcctacaactgcaaaagataccagcatgccaatctcaactcctagtgaagtaagtacttcattaacaagtatacttgtcagcaccatgccagtggccagttctgaggctagcaccctttcaacaactcctgttgacaccaggacacttgtgaccacttccactggaaccagttcatctcctacaactgctgaaggtagcagcatgccaacctcaactcctggtgaaagaagcactccattaacaaatatacttgtcagcaccacgctgttggccaattctgaggctagcaccctttcaacaactsctgttgacaccagcacacctgtcaccacttctgctgaagccagttcttctcctacaactgctgaaggtaccagcatgcgaatctcaactcctagtgatggaagtactccattaacaagtatacttgtcagcaccctgccagtggccagttctgaggctagcaccgtttcaacaactgctgttgacaccagcatacctgtcaccacttctactgaagccagttcctctcctacaactgctgaagttaccagcatgccaacctcaactcctagtgaaacaagtactccattaactagtatgcctgtcaaccacacgccagtggccagttctgaggctggcaccctttcaacaactcctgttgacaccagcacacctgtgaccacttctactaaagccagttcatctcctacaactgctgaaggtatcgtcgtgccaatctcaactgctagtgaaggaagtactctattaacaagtatacctgtcagcaccacgccggtggccagttctgaggctagcaccctttcaacaactcctgttgataccagcatacctgtcaccacttctactgaaggcagttcttctcctacaactgctgaaggtaccagcatgccaatctcaactcctagtgaagtaagtactccattaacaagtatacttgtcagcaccgtgccagtggccggttctgaggctagcaccctttcaacaactcctgttgacaccaggacacctgtcaccacttctgctgaagctagttcttctcctacaactgctgaaggtaccagcatgccaatctcaactcctggcgaaagaagaactccattaacaagtatgtctgtcagcaccatgccggtggccagttctgaggctagcaccctttcaagaactcctgctgacaccagcacacctgtgaccacttctactgaagccagttcctctcctacaactgctgaaggtaccggcataccaatctcaactcctagtgaaggaagtactccattaacaagtatacctgtcagcaccacgccagtggccattcctgaggctagcaccctttcaacaactcctgttgactccaacagtcctgtggtcacttctactgaagtcagttcatctcctacacctgctgaaggtaccagcatgccaatctcaacttatagtgaaggaagcactccattaacaggtgtgcctgtcagcaccacaccggtgaccagttctgcaatcagcaccctttcaacaactcctgttgacaccagcacacctgtgaccacttctactgaagcccattcatctcctacaacttctgaaggtaccagcatgccaacctcaactcctagtgaaggaagtactccattaacatatatgcctgtcagcaccatgctggtagtcagttctgaggatagcaccctttcagcaactcctgttgacaccagcacacctgtgaccacttctactgaagccacttcatctacaactgctgaaggtaccagcattccaacctcaactcctagtgaaggaatgactccattaactagtgtacctgtcagcaacacgccggtggccagttctgaggctagcatcctttcaacaactcctgttgactccaacactcctttgaccacttctactgaagccagttcatctcctcccactgctgaaggtaccagcatgccaacctcaactcctagtgaaggaagcactccattaacargtatgcctgtcagcaccacaacggtggccagttctgaaacgarcaccctttcaacaactcctgctgacaccagcacacctgtgaccacttattctcaagscagttcatctcctccaattgctgacggtactagcatgccaacctcaacttatagtgaaggaagcactccactaacaaatatgtctttcagcaccacgccagtggtcagttctgaggctagcaccctttccacaactcctgttgacaccagcacacctgtcaccacttctactgaagccagtttatctcctacaactgctgaaggtaccagcataccaacctcaagtcctagtgaaggaaccactccattagcaagtatgcctgtcagcaccacgccggtggtcagttctgaggttaacaccctttcaacaactcctgtggactccaacactctggtgaccacttctactgaagccagttcatctcctacaatcgctgaaggtaccagcttgccaacctcaactactagtgaaggaagcactccattatcaattatgcctctcagtaccacgccggtggccagttctgaggctagcaccctttcaacaactcctgttgacaccagcacacctgtgaccacttcttctccaaccaattcatctcctacaactgctgaagttaccagcatgccaacatcaactgctggtgaaggaagcactccattaacaaatatgcctgtcagcaccacaccggtggccagttctgaggctagcaccctttcaacaactcctgttgactccaacacttttgttaccagttctagtcaagccagttcatctccagcaactcttcaggtcaccactatgcgtatgtctactccaagtgaaggaagctcttcattaacaactatgctcctcagcagcacatatgtgaccagttctgaggctagcacaccttccactccttctgttgacagaagcacacctgtgaccacttctactcagagcaattctactcctacacctcctgaagttatcaccctgccaatgtcaactcctagtgaagtaagcactccattaaccattatgcctgtcagcaccacatcggtgaccatttctgaggctggcacagcttcaacacttcctgttgacaccagcacacctgtgatcacttctacccaagtcagttcatctcctgtgactcctgaaggtaccaccatgccaatctggacgcctagtgaaggaagcactccattaacaactatgcctgtcagcaccacacgtgtgaccagctctgagggtagcaccctttcaacaccttctgttgtcaccagcacacctgtgaccacttctactgaagccatttcatcttctgcaactcttgacagcaccaccatgtctgtgtcaatgcccatggaaataagcacccttgggaccactattcttgtcagtaccacacctgttacgaggtttcctgagagtagcaccccttccataccatctgtttacaccagcatgtctatgaccactgcctctgaaggcagttcatctcctacaactcttgaaggcaccaccaccatgcctatgtcaactacgagtgaaagaagcactttattgacaactgtcctcatcagccctatatctgtgatgagtccttctgaggccagcacactttcaacacctcctggtgataccagcacacctttgctcacctctaccaaagccggttcattctccatacctgctgaagtcactaccatacgtatttcaattaccagtgaaagaagcactccattaacaactctccttgtcagcaccacacttccaactagctttcctggggccagcatagcttcgacacctcctcttgacacaagcacaacttttaccccttctactgacactgcctcaactcccacaattcctgtagccaccaccatatctgtatcagtgatcacagaaggaagcacacctgggacaaccatttttattcccagcactcctgtcaccagttctactgctgatgtctttcctgcaacaactggtgctgtatctacccctgtgataacttccactgaactaaacacaccatcaacctccagtagtagtaccnnnnnnnnnnnnnnnnnnnnnnnnnnnnnnnnnnnnnnnnnnnnnnnnnnnnnnnnnnnnnnnnnnnnnnnnnnnnnnnnnnnnnnnnnnnnnnnnnnnnnnnnnnnnnnnnnnnnnnnnnnnnnnnnnnnnnnnnnnnnnnnnnnnnnnnnnnnnnnnnnnnnnnnnnnnnnnnnnnnnnnnnnnnnnnnnnnnnnnnnnnnnnnnnnnnnnnnnnnnnnnnnnnnnnnnnnnnnnnnnnnnnnnnnnnnnnnnnnnnnnnnnnnnnnnnnnnnnnnnnnnnnnnnnnnnnnnnnnnnnnnnnnnnnnnnnnnnnnnnnnnnnnnnnnnnnnnnnnnnnnnnnnnnnnnnnnnnnnnnnnnnnnnnnnnnnnnnnnnnnnnnnnnnnnnnnnnnnnnnnnnnnnnnnnnnnnnnnnnnnnnnnnnnnnnnnnnnnnnnnnnnnnnnnnnnnnnnnnnnnnnnnnnnnnnnnnnnnnnnnnnnnnnnnnnnnnnnnnnnnnnnnnnnnnnnnnnnnnnnnnnnnnnnnnnnnnnnnnnnnnnnnnnnnnnnnnnnnnnnnnnnnnnnnnnnnnnnnnnnnnnnnnnnnnnnnnnnnnnnnnnnnnnnnnnnnnnnnnnnnnnnnnnnnnnnnnnnnnnnnnnnnnnnnnnnnnnnnnnnnnnnnnnnnnnnnnnnnnnnnnnnnnnnnnnnnnnnnnnnnnnnnnnnnnnnnnnnnnnnnnnnnnnnnnnnnnnnnnnnnnnnnnnnnnnnnnnnnnnnnnnnnnnnnnnnnnnnnnnnnnnnnnnnnnnnnnnnnnnnnnnnnnnnnnnnnnnnnnnnnnnnnnnnnnnnnnnnnnnnnnnnnnnnnnnnnnnnnnnnnnnnnnnnnnnnnnnnnnnnnnnnnnnnnnnnnnnnnnnnnnnnnnnnnnnnnnnnnnnnnnnnnnnnnnnnnnnnnnnnnnnnnnnnnnnnnnnnnnnnnnnnnnnnnnnnnnnnnnnnnnnnnnnnnnnnnnnnnnnnnnnnnnnnnnnnnnnnnnnnnnnnnnnnnnnnnnnnnnnnnnnnnnnnnnnnnnnnntgggcaaaggataagaacagacacttttcaaaagaattttcctttttgaaactgacctttcttttcaatctccactcactactttttgtggttttcttcttaaacatttactcctaaactccttttgctctgacttacttgttttccctttgataaaacctgcatcaaggttttctgtctcagcactctctcacttctctgctctcactgtttcttgcacaagttccccttttttgaacaaagcattacctctctttgcctgggcacctcagtctccagtattctgtccagaagtcctgttttctctcttttgtattctgcaggtctctattccattgcactttgtatgccatgatgttattaactctgagtggtttgttttcttttaaactttttagtttactttgtaaactttctagtggattttctcattgattttgttcatactaaagtacgaactttttttttgcagaaggtttttgcctattcattcatgtgtacctttgtcaagtatctctgccaccattcacttttattttgattcatcttatcctctgagcacccactatagaagcaaaagaagattccttcacttctgtcagctctgaattctacctccaatgcctatgagtgttttgctgtccttatgtatccccttcctttctctgactcaagaactttcactcagccttcttctctcttgttagggtgagcgttgcaccattcaatacctgctattataatatcctgtatattttattatatgaatcatgtaatatactaatagacctgtgagtatgactcccagattaagaatattttgcatacatttttaaaagtatgctaattaaaatacttgaaaacactgatttatttagatgaataggctcacaggtatatgatctgtgtctgcccacagaactgcccaatcccatcttgaattgatgatgatgaagggtggttcttcagcttttgactactacattttctctggactttgtgatttttttcctttgctgaattctactttgcctgaacttttttcttttcttttcttttctttttctttttttttttgatggagtttcactcttgttgcccaagctggagtgcaatggcacgatcatggctcactgcaacctccacctcccgggttcaagtgattctctcacctcaacctcccaagtagctgggattacagagcacaccaccacatccagctaatttttgtatttttagtagagacagggtttcaccatgttggccaggctgttcttgaactcctgtcctcaggtgatccacccgcctcagcttcccaaagtgttaggattacaggtgttagccaccatgcctggctggattttctatcatatggcttttttctctggattgtctccaatatatctttgtcttcttgagctctctgattctcagatgagtggtctgagaattttcaggtgggagacctggaccttgtatttccaggaagcctcgtaggtgtctcacgacaaaggccaggtggctgcaatgccactggacccaccatctggtgtcggtcacatctttgaagcagattgtcctccttctgtcttcctcttcttccccagagattggccttcccttagactgttgagcaatgggtgaacgcgccccagcatctgcttctgttgtttctgactagcctgtgttttggcacttagctcaggtctggacgtcttcagtagtgaaagcgggagagagatagagggaggagactgatttaggatgtatgggtttccagtgtgcccaggactcttgacttctctcttctattctttccaaatgtcttggagcaaaagcccataaatagaggctgcatgctgtgattttcacaagtgtggatcctgctctctgagtctgtttagggtaaaccggaaggcagaggtgaggcaggtctttgcagagtctatacatacctcgtgcacttccccagacaaaatacaccttgaatactgatctgcccaggcacagcgagtttcaagaaaagccaaagaaaacagagctttagattttccaggttgattggcacagatattctagagttggctatcactacttcctacctatttaaactaagaggagtttatttgttgaattgcaatttaaaaaggagttgttaggctgggcatgatggctcatacctgtaatcccaggattttgtgaggctgagactggagaatttgttaaggccaggagtttgagaccagcctgagcaacagagcaataccccatctctacagaaaaattttaaaaattagccaggcatggtgattcatgcctgcagtcccagttacttgggaggctagggtgggaggattgcttaagcccaggaggtcaaggctgtagtgagctatgattgcaccactgcgctccaacctgaacgagatggtgagactctgtctcaaaaaataataataataaaatgcccggcacagtggctcacacctgtaatcccagcactttgggaggctgaggtgggtggatcacaaggtcaggagatcaagaccatcctggctaacacggtgaaacatcgtctctattaaaaatacaaaaaattagctgggcgtggtggcaggcatgcctgtagtcccagctacttgggaggctgaggtaggagaatggcgtgaacctgggaggcagagcttgcagtgagcygagatcacgccactgcactccagcccgggcgacagagcaagactccgtctcaaaaaaaaaaaattaaaataaataaataaataaataaataaataaaataagatctaaactcctccctcaaactccacatcccagtaaattaaaaaagaatcagaatgagtcataacagtaacgattgccagtatgggcttttccaaagcgggtgttgaggaacaacgaccatctaattctcaacctgggtggaatctagactgttcaagttcacccgggttctcccttcctcagccctgactgtgtcgctcacctctcacaataccaggtttctctttcttcacgtttttggggtaaagtcaagcatgctggactaggactgggtggagtgtagcctgcactcggacccatcgggacgtggcttagcctctctctgactcactttgcgtatctgtgaagtgaggataatagtaactgtcctgtgcacccctggggtctcatgagagtatcatattaggcagtgtcggagccgggcgcagtggctcacacttgtaatcccagcactttgggaggctgaggtgggcagatcacctgaggtcaggagtttgagaccagcctggccaaactggtgaaaccccgtctctactaaaaatacaaaaacttagctgggtgtggtggcacgcgcctgtaatctcagctactcaggaggctgaggcaggagaatcacttgaacctgggaggtggaggttgcagtgagccaagatcgcgccaytgcactccagcctgggtgacaagggtaaaactcggactcaaaaaacaaacaaattagacagtgtccgtgcaaacgcattgtaagctgtaaagtgctgtgctcaacatgtaaccacagtagatccctgctccttccagtgaggtgcctcaatggaggaacttggaaagaaaacttctgtgattgttccacaggctttggagatgggtgccagaatacggcctctcgctgcaagaatggaggcacctgggatgggctcaagtgccagtgtcccaacctctattatggggagttgtgtgaggaggtggtcagcagcattgacataggtgagtgcaaccccaggccttcccccaccccatgccctgggacccgacctccatacaagcaacagttcctgccycaccttgatgtgaggccaggaatagggcctcttctgggctgtggtgttttttgttttgttttgttttgttttgtttccacccagtgctatgaatgctaaagcattacaaaatgaataaaataggccaggcacggtggctctcgcctgtaattccagtactttgggagcctgaggcaggatcacttgaggccaggagctcgagaccagcctgggcaacatactgagatctaatttatttattwaaaaaaaaaaaaaacttgactgggtgtggtggtgcatacttgtagtcttagctgcttgggaggctgatgtgggaggattgcttgagcccaggaggtcaagactgcactgagctatgatctcaccactgcactccagcctgagcaacagaacaataccctgtcaaaaaaaagaaagaaggaaggaaggaaggaaaaaagaaagaaagaaagagggaaagagataaagaaagaaaagaaaatgaataaaaaggaaagaaaaggaaataaaacaagaaggtgtattttggatacaaatttggcacaaaattttaccataaaatacaatggagctcactccctccacccaggctgggggcagatcttctgagtaggaaactcagagatgctttgctcagtaagtctacccgcctcagggccaccggagactatctctgcccaaatggaactgactgtgacagtgaccagtgtgaagttcaccgaagagctaaaaaaccactcttcccaggaattccaggagttcaaacagacattcacggaacaggtaagtctgggagagcaaggccccatagctactcagttccccccagagcagagtctgtagggtaagaaggtagctgggggctgttccsttgttagatgtgcgggagttctctcaggcccccacgtcctcagggcttgccagtgcaggagggaagagatgaggccaggttttacctgggggctgcaggaggcccctggggtggagcaggtctctggaaagaaaccactccatttgatgagtgtgctatgatgctgcgggacaggatcatcccctggtcctgtgacctcctgatgtcccacagaacggccccgtggtccctctgggatgacacagtggccccttgcctttcagatgaatattgtgtattccgggatccctgagtatgtcggggtgaacatcacaaagctacggtaagtgtctgggcccktgggaagagggtctgtggcgtggaagcagtggtcatagttataaaggcaattagaactgtgccccctgcattactgtgcccaggcagctattgcagaataccaccgatggggcggcttaaacaacagaaatctatttctcccagttctaggggctggaggtctaagatgaaggtgtgggtgggtgtggtttctctggaggcctctctccttggcttgtgggtggctgccttcttgctgtgtctttgcatggtctttcctctgtgcacatctccctgctgtctctgcatatccaaatttccccttcttataaggacaccagtcagactggatgagggcctacactaatgacctcattttaatttactcacctctttaaagaccctatctccaaatatagtcacattctgaggttctggaggttagggcttcaatatataaatgtaggaggcaccaggtgcagtagctcacacctgtaatcccagcactttgggaggccgaggtggaaggattatttgaggccgggagcacaagaccagcctgagcaacatagcaagaccttgtctctacaaaaaatacaaaaattagcagggtatggtggtatacacctgtagacctagctactcaggaatccgaggcaggaggatcacgtgagcccaggagtcagaggctagagtaagccaggatcgcaycattgctctccagcctgggcagcagtgagactctgtctctaaaacaaaaaacccaaaaacctcaaggatggcctcttctgtggttcccattcctccatccatcttcatcgctgaggcttccctaagacctaccagagactccctttgtggaaagttctcttaggcacaggctgctgggagaactcctatagcagggggcccagckcagtgtgtaggacagagccatcaccccaaactgtcctgccccaaatgcctaggacagagtcatcaccccaactgtcctgcccccagctctgccttcccttgggatcagagagggtgaagcttgcctggtacagattctagaggtaagcaccctattctgaccccaggacgtcttcccttccctcttcagtcttggcagtgtggtggtggagcatgacgtcctcctaagaaccaagtacacaccagaatacaagacagtattggacaatgccaccgaagtagtgaaagagaaaatcacaaaagtgaccacacagcaaataatgattaatgatatttgctcaggtgaactctgggcttccagggagggaagggagaaggcatcagagctggggcatgactttcttaatagacaggagggcgggagtgaggatggttaatgggtgggtgcaagaatcactgtggggtcctagagtccctggggttgcagcgcaaagaagccccaggattgggccgagagagtctttaaccttcatcatcctctggcccatttttttccctggggtaagggaagggacaaaggcaaatggagagagtaggagaacatggagatccaggaattcgtcccggaacctgcaaggccagacatacaagcagaccagatcttgcagggygccaggactaacggctataggacaggggagtctgctggaaatgaggacccatgggcctcgttacacaggggttcatctaagtgtgtggatcatggcagaagagggaagaaggaggcattgggcaggcatggtggctcacgcctgtaatcccagcactttgggaggctgagacgggcagatcacttgaggccaggagttcgaaaccagcctggtcaacgtggtgaaaccccatctctactgaaaatacaaaattagccaggcatggtggcagatgcctgtagttctagctacttgggaggctgaggcaggagaatcgcttgaaaccgggaagcagaggttgcagtgagccgagattgcaccactgtactctagcctgggtgacagagcaatactccatctcaaaaaaaaaaaaaaaaaaaaaaagagtaagaaagaaaataagagagaaaagggaggcataggacaaaaaggctcaggacacttggagggtcactggacgcgaggctgatgctgcccctctgccggggccggattcccacctccccatcgcagcccaccccttctcacacacannnnnnnnnnnnnnnnnnnnnnnnnnnnnnnnnnnnnnnnnnnnnnnnnnnnnnnnnnnnnnnnnnnnnnnnnnnnnnnnnnnnnnnnnnnnnnnnnnnnnnnnnnnnnnnnnnnnnnnnnnnnnnnnnnnnnnnnnnnnnnnnnnnnnnnnnnnnnnnnnnnnnnnnnnnnnnnnnnnnnnnnnnnnnnnnnnnnnnnnnnnnnnnnnnnnnnnnnnnnnnnnnnnnnnnnnnnnnnnnnnnnnnnnnnnnnnnnnnnnnnnnnnnnnnnnnnnnnnnnnnnnnnnnnnnnnnnnnnnnnnnnnnnnnnnnnnnnnnnnnnnnnnnnnnnnnnnnnnnnnnnnnnnnnnnnnnnnnnnnnnnnnnnnnnnnnnnnnnnnnnnnnnnnnnnnnnnnnnnnnnnnnnnnnnnnnnnnnnnnnnnnnnnnnnnnnnnnnnnnnnnnnnnnnnnnnnnnnnnnnnnnnnnnnnnnnnnnctgtaacctcggcaagtgccagatgtctctaagtggacctcagtgcctgtgagtgctcccccatctcctccagcccagcccagacgtcctggtcctcccctcccctgcagggcttcaccccaggcattgcctggagaccaaggtcatgggactaggtcccagcgtctcctgaatgtgtccagctgcagaggaattgggttggggataagggaaaaacatgagtagttgagctccaaggctgtgtccagaacagcctaaccatgtcctctctgtgctaaggagggctgaggaaggtgacaacctcctgggaaggttgtccgactgagggaacagagacagagccttgctctctctccagagagagaacaagatcctctgctggtgaaatagaaacagaaggttacacacccatatggggagtggggagaagccctctagcccagtcacagaggtaagaaagcgaagaaaaacattgtcactttaaacagaaccaaagagagagaacagctggagcatcaggtgcgggaagaagccacatgtgggcaaagacctgagtagttaatttgggaaggcttcctggaagagggggtcacaagctggaaaggggaagaaaggaacagggcttagagagggcatctcaaggcagcagggaagaagagcttcaggggtgtagtgggagctctggatcagggctgcagcctggctttcttgacagagaggaaggctggaagtgaggaggttaatgggtggatgcaagatcactgtggggtcctggagtccctgggggtgcagcccagggaagacccagggttgggccaaccgtcctaggtcctgggttgcaactggaggcaaaatctaaaagcttggagtgggaattgggctcatttgaggaccacctccagggatgctggtcttcatctctgttcatcccctcggggtgccttgctttatgccccctggcaatctcttcttgcctcctcttcattaaacacccactgggcagggcccaggtctgaagctggtgctgactccgttctctctccccaacctgccgcttctctcccatctcakctgcgtgaccacggaaactcactggtacagtggggagacctgtaaccagggcacccagaagagtctggtgtacggcctcgtgggggcaggggtcgtgctgatgctgatcatcctggtagctctcctgatgctcgttttccgctccaagagagaggtgaaacggtgagcgagccyctaccacctcctcttccaactccctccagctcctcctcttcctctgaaccctctgtctctaatcacttcatagtctaggtgggcagcgggggcagctaaaaatggggatacagcttgtccctggtccttattcctgttccccaatcctaatggggtctctctgatgtttccatcactaggcaaaagtacagattgtctcagttatacaagtggcaagaagaggacagtggaccagctcctgggaccttccaaaacattggctttgacatctgccaaggtattggccttcctctctgaactcagaatggctcaaaatgtggaaacaggctgggtgcggtgggctcacatctgtaatcccagcactttgaaaggccaaggcaggagtattacttgaggccaggagctcaagatcagcctgggcaacaacacagcaaaactctatctcttaaaaaaaaataaaaaataaaaataaaaaagggaggctgaggcaggtggaccacttgaggtcaggagtttgagaccagcctggaccacatagtgaaaccctgtctctactgaaaatacaaaaaaattagctgggcatggtggcaggtgcctgtaatcccagctactcgggaggctgaggcaggagaatcacttgaacccgggaggcagaggttgcagttagccgagattgtgccattgcactccagcctgggcaacaagcacgaaactccgtctcaaaaaaaaaaaaaagaaaaaaaattttaaattatctgggcatggtggcatgcacctgaagtcccaactactcatgaggctgaggcaggagaattgcttgagcctgggagatggaggctgcagtgagctgtgattgtaccactgcactccagcctgggcaacagaacaagaccctgtcaaaaaaaaaaaaaaaaaaaaaaaaaaaaaagagtccataggaggcacctgggaagaccctgaggcttatagagtgaagggggaaaatatttcccactccaaaatgtttggctccacagctaaaaccttatttccattactgactcctgtgagaccctggatggggcatagtgaactgaaccactggggagacacaggttccttgagggtggtagatttctctagtgcacagattagtgctcgggagtgggtgagctcattagcaggggagttgtacctcagtaaagagactaacattagattttgctaggttaaaggcacatgttaaaatttctaaaaatagagtctttaaattctaaagaaggaaatatgtggaatgagaaatttctcaaaatagtctttaaattctaaaaaggggaagattagaatgaggaaaagtccagtcaacccacaaagaggcaggaaagggagaaaaagaaaaaggaggtgagacgcagtggctcatgcttacagtcccaatgctttgggaggccgaggctggaggwtctcttgaggccaggagttcaagaccagcctgggcaacataacgagttcaaaaaattaaaaaaattagccaggcacagtggtgcatgcctgtaatcctagctattcaggaggctgagtcaggaggatcacttgagcccaggaggtcaaggctgygtgagctatgattgcaccactgcactccaacctgggcaacagagcaagaccctgtctctaaaacaaaacaaacaaaaaaaatgtggctcatgcctgtaatcctagcactttgggaggctgaggctagtgggtcacctgaggtcaggagaccaacctggccaacacggtgaaaccccgtctctactaaaaacacaaaaattagctggacatggtggcatgtgcctgtaatcccaaccacctgggaggctgaggcaggagaatcgctggaacctgggaagtggaggctgcagtgagctgaaatcgcaccactacactccagcctgggcaacagagcaagattccgtagaaggaggaggaggaggaggaggaaggggaagaggaagaggagataggacacatagaaaatagaaaataaaatgataggacgtaatgcaaatatatcacaaatcataatacacataagtagattaaactctagtttaaaaaggatttttttaaaaaaaaatctaggtatccactgtcggtgggaggtacatgttaaatagaaacacaaaggttagaaacaaaagtgtagaaaagacaaaacagggtaatactaaacaaagtgtctgttgttttgtgtatagctgtactcattgcaggcacataaactttaaagcaaaaagaattactaggtataaaaatgatcaatattaggaaatggcttactctgttagacacaagtttaatttgtatgctctgttagtacaatctcgaaatagataaagcaaaaactgacaaagctgcaagaaaaaaattaacaaattcaccaacatggtaagagatttttaaaacgcctctcttagtaattgacaaaartcagtgaggattacagaacttttgtacaaaataattagccttaatacaatacagaacaccacattcaacaaatagagggtacacatttattacctgagtccacaagaaaacttttaaggatggccatacacaggccattaaaaaagcctcaaaaaacttacaaaaattatttaaatcagacgatattatctgaccataatgcaagtatgttagaaatcaataacaaaaatagttttggaaaacaaaaacaaaaatcccgtatctttggaaatttttttcaagtgtctaaataatgtatggatcagataagagattatagtgaaagtgagaaattagtgtcaagacttgtgggatgcagctacagctatactcagaaaattcatagccttaatatgcctgtattagggagctgctgagtcaggtaatgttgacagtttgtcacattttcaagggtttgcagtttcctaggggtagagaaaaactgtctcatcctccatcagatgggattaaagggagagatgaaagtttgtccttctaacctcctgtttccatggtgctttccatccctccacaagatgatgattccatccacctggagtccatctatagtaatttccagccctccttgagacacatagaccctgaaacaaaggtaagaagggcctggatgggatgctggcctcccccaaccctgcgactttcttcttctcctttcctacatggtaggaccttcagaaaaacagaaccatgtttacagtttattggtccaggtgatcctcccaggtccatactgccaggaaacaagcctaactcaggggaagaataaaagctaagtagcaaggtggaatcactttcctttgacccctgaggcttcaggttcggaggtttccttccctactctaagtacatccttgatggccaacttacttagttattttaacttgtaaacacacataaaagtcaaaatagcagtgcagtaaatacttacatattccatctagctcaacaaggcttaacatgccatatgtttctttctttgtattgatctattcactaatttttgctgaataatttggaagtcagctgccaacattatgacacttgatctctaaccatttcagcacacacttcccaataccacgattatatccaatacattgatcataacttcacaatatcgtctggtacccaatgtttccaattagcccaaggacatcttttattactatttttttttctcagatgtagatataacagatttcactcactgacttccgttatgtctctttggtcttttaatctagaatgggctcctacattttttaacatattgctttttttaagagtctaggatggttgtcttgaaaaatgtctcacactcctggtttgtttcatggtgtcatctaacttgcccmcccatccttagtatcagaggtattagaggtattctaggattggaaatactggaggttggttctagaggcttaactggaatcagattaaacatttttgttatatcatagataatgctatcgcctcacttcaacaagtatataacatcaggttttcccctcatgattaaggccgagattggtcacttgggcaaaaagtgaccactccttgatcactgcyttaatatgatttaaactagatggatatttgagggtaggagaaataacaagtgtgaacgtcttcaggtgctatgctcccttgacatagccctttgggcaaggatgaaatctccagcaaggataactgtaaacctacctggcggggaggggaaggcacaattggtttgtgctagaatccaggtaatgggacaagttctaaaccaaccacttaggccaggtgcggtggctcatgcctgcaatcccagmacttcgtgaggccaaggcaggaagattgtctgaagtcaggagtttaggaccagcctgggcaacaaagtgagactctgttgctataaaagaaataataatcatagccaggtacagtggctcacacctgtaatcccggcacttggggaggtcgaagtggatggattgcttgagcccaggagtttgagatcaccctgggcaacatagtgaaacctcatctctacaaaaaatttaaaaattattcaggtgtggttgtgtgcacatgtagtcctagctacttgggaggctgaggtgggaggattgcttgaggccagaagttacaggccatggtgagccgtgattgtgccactgcactccagcctggatggcagagtaagaccctgtctcaaaaaaataataaaaaataaaaataattaaacagaacacttcctatcccaatcctccttatgcttccagaatcccaaattcctcatgggctgagccctcacttggttttatctctcttttcagatccgaattcagaggcctcaggtaatgacgacatcattttaaggcatggagctgagaagtctgggagtgaggagatcccagtccggctaagcttggtggagcattttcccattgagagccttccatgggaactcaatgttcccattgtaagtacaggaaacaagccctgtacttaccaaggagaaagaggagagacagcagtgctgggagattctcaaatagaaacccgtggacgctccaatgggcttgtcatgatatcaggctaggctttcctgctcatttttcaaagacgctccagatttgagggtactctgactgcaacatctttcaccccattgatcgccaggattgatttggttgatctggctgagcaggcgggtgtccccgtcctccctcactgccccatatgtgtccctcctaaagctgcatgctcagttgaagaggacgagaggacgaccttctctgatagaggaggaccacgcttcagtcaaaggcatacaagtatctatctggacttccctgctagcacttccaaacaagctcagagatgttcctcccctcatctgcccgggttcagtaccatggacagcgccctcgacccgctgtttacaaccatgaccccttggacactggactgcatgcactttacatatcacaaaatgctctcataagaattattgcataccatcttcatgaaaaacacctgtatttaaatatagagcatttaccttttggtatataagattgtgggtattttttaagttcttattgttatgagttctgattttttccttagtaaatattataatatatatttgtagtaactaaaaataataaagcaattttattacaattttcatggttcccagatctttcctcctgtttcccatagctcctgtttctaacctcccagactctctctctctcctccagaacataaaatcggatgcttttggggttcaagacaacaagagagagatttgcagtggaaagaggaccattccttgaactccactgacaccatttgctggtgtccaagaggcaaggcagacagacagacagacacacacacacatatacacatacacacagaggggggggggggagagagagagagagagagagagagagagagagagagagactcacttcctaccaaagaaaaccaaattttgcaagctctccttctgaaaacgggcttttatttctttccatacatctaaagagatagagacctgggttctatttcaagctttctcgtgaattccttgggttaaatctgggaaaaatctatttggactcagtcttgccttctgccgaataaggactaggttatttctaaagcctctttcatcgctgtccttcttaatattcctaggacgctttttaataattattgttattccagccatgccgctcaggattcattgtattcttgaaagtctgtcccacccgccacccgcttcaaagcctaacctgagacagaacctggactctgcttccccctactggacactctgagcacctgcaggcaccatgccgtttctcagcggtccccttctggcctctcctgtgacaaaaatattccgttacacttgatcatttccatatttgccatcaaaattctgtttcttttcttttcctttttttgaaacaaagtctcactctttcgcaaaggccaaagcacagtggtgtgatcactgctcactgcaaccttgagctcctgggctcaagaattcctccagcctcagcctcccaagtaactgagaccacagatgccggccaccacgcccggctaatttttaattttttcgtagagacggggtttcgctgtattgtccaggctggtcttgaattcctaggctcaaacgatccaaccacttctgtctcccaaaatgctgggattccaggcatgagccactatgcccggccttttttttttttttaattttgaaaatttgcaaatctacagggaagttaaaacaataaagttaaaaaagtgaaccctacctgggcgtggtggctcacgcctgtaatcccagcactttgggaggccgaggcaggcggatcacctgaggtcaggagttcaagaccagcctggccaacatggtaaaaccctgactctattaaaaatacaaaaactagccgggaatggtggcgcatgcctgtaatcccacttacttaggaggctgaggcaggagaatggcttgaacctgggaggcggaggttgcagtgagcggagatcgtaccactgcattccagcctgggtgacagagagagtctgtcttaaaaaaaaaaaaaaattacacatatatatgtatatataacagtgaaccccatataaccttcacctggagttatcagttgttaacgttgtgtcctatttgctctaaagtggtatgtattttttcgaattaagcaaaattggaaattaaaaattagaaaagttacaaataaaaaattaccacgaatctgacctttttttttttaattttagactcaaggggtacatgtgcaggtttgtttcaaaggtatattgtgtggtgctgaggcttagagtatgaataaatctgtcacacaggtagtgagcatagtacccaataggtagtttttctctttttttcttttcttctttttttttttttttttttgagaccgagactcgcggtcacccaggctggagcgcagtggcacaatctcagctcactgcaacctctgcctcccgggttcaagtggttctcctgcctcagcctcccgagtagctgggattacaggcgtgcaccaccttgcctggttaatttttatatttttagtagagacggagttttgccatgttagccaggctggtctggaatgcctgacctcaagtgatctgcctgccttggcgtcccaaaatgctgagattacaggcatgagccaccacacccggccccaataggtatttttccgacccttgaccccctccctccttctctgattttggggtccccagtgtcagctgttcccatatttgcgtccatgtacactcaatgtttagcactcacttataagcaagaacatgcggtatttggttctctgtctttgtgttaattcatttaggataatggcctctagttgcatccacgttgctgcaaaggacgatttcattgttttatttatggctgcatagtattccatggtgtacatgtaccacattttctttacccaatccaccattgatgggcacctaggttgattccatgtctttgttactgtgaatagtgctgcaataaacgtacaggtgcaggtgtgttgggggtagaatagtttatttttccttggagtacatacccagtaatgaacaatcctcagttcccaaaactgagctgaattcatacatcttcactttcagacctgcctcctgcctcccataggcatctgtggccatgggagcggggacttaacagggctacagaccccacatcccatctggaactgaaatctcagcaccttcccactctctcatcctatctgtgaaacggagaggcaggacagagcacccagacccataggctgcccaggtccactcttggtgagccatttactacctgcgtgagcttgggaaagtaacttcttctctctgaacctctgctccctcagctgtaaaaacaaaaaacaaaaaacaaacaaacaaaaaaaaacacaacaacaacaacaaaactgagtagctgggcgtggtgactcacatctgtaatcccagcactttgggaggctgaggccggtggatcacctgaggtcaggagtttgagaccagcctggccaacatggtgaattcccgtctctactaaaaataggaaaattagccaggtgtggtggcacacacctgtaaccccagctacttgggaggctgaggcagaagaatcacttgaacctgggaggcagaagttacagtgagccgagattgcaccattgcactccagccagggcaataagagcaaaacaactctgtattcaaaaagaaaaataaacccaatgaccacctaccatgtgcaaagtacctttcatcattcccagtccaccaatgagggcaaccaaggcagacatcctagcaacttgcccaagatcatgaaaccaatgggtatgaggctgggattagaaaacagggtggcatctggtcaaacctgtgttctttttttttttttttttgagacagggtcttgctctgttacccaggctggagtgcagtggtgcgatcatggttcactgcagcctcaaacttctgggctcaagcaatcttcttgcctcagcctcctaagtagttgcaggtgtgcattgccatgctcagctaatttttaacatttttaaaatagagacaggggtcttgctatgttgcccaggctggtctcgaactcctgacttcaaatcatcctaccacctcggcctcccaaaagttctgggattacaggtgtgagccacagtgcccgactcaagtctgcgttcttatctatcacttatgtgccctccccgtgggaccactcttgggataaactgggttaatacacgtaaaatgcttggaacaaattctggcatataaaaaattctaaaagagaaagagtgggagagagaaaacatgagctattgctacatcagcttccctgtcataattctctctttgcagctcatccctcttaagtttcttctctctcttcctccaaccatacaagagtgatggctggacttgaagcaagacagaaggctggccctgtcactttgcagaaaccaagaaatccaaatgcatagagatgcaaagagatagttggaggcagatacactaagtcacagaaagaggggtctggtgggggcttgatatggtttggatgcgtgtcccttccaaatctcatgttgaaatgttatccccgatgtcggtagtggggcctagtggcactgagtcatcgggtcagatccctcatgaatggctcagcaccatccccttggaaatgaatgagctctgacttagttagttcatgggagatctggttgttcaaaagagtttaggccaggcaaagtggcacatgcctgtaaccccagcactttgggaggccaagacgggaggattgattgaacctaggagtttgcgacaagcctgggcaacctagtgagacctccctgccccaatctctaccaaaagttaaaaaaattagctaggcatggtggcatacacctgtaatcccagctactcaggaggctgaggcgggaggattgtatgagcctgggaggttgaggctgcagtgagctatgatcgcaccactgcactccagcatgggtgacagggggagagcctgtctccaaataagccgggcatggtggctcatgcctgtaatcccagcactttaggaggccgaggcaggtggatcacttgaagtcaggagttcgagaccagcctggccaacatagagaaaccctcgtctctaataaaaatacaaaaattagcagggtgtggtggcccgcgcctgtaatctcagcaactccggaggctgaggcaggagaatcacttgagcctgttggggggtgggggttgcagtgacccgagattgcaccactgcactccagcctgggtgacagagcgagactccatctcaaaaaaaaaaagaaaagaaaagaaaagaaaagcactttctctgtctctctttctctctctctctctctctctctctctttctctctctctctctctctctctctctgtgtctctctctcgcgtgcgccatgtgactggctccgtcttcgccttcctccatgtttgtgagccttcttaaggccctcaacagaagcagatgccgctatgcttctcagacagccagcagaaccgagagccaaaatacaaccttttttcttgagaaattacccagccccaggtgttgctttatagcaaagtaaaaacggactaacaaaggacctaaaggcaaagaggcactcagggaccacccctccgggctcacctcgggtcacctgcaccgttcctcaccgtcacgcaggtgcacacgtaccactgcttgacttt

SEQ ID NO: 94033 - DNA, 41559 bp, Homo sapiens
  misc_feature (1)...(41559): n = A,T,C or G
aaaagtgtctatgcccggatacagtggctcatacctgtaatcccagcactttgggaagctgaggcaggcagatcgcttgagcactggaattcaagaccagcaacacggtgaaacccccctctacaaaaactacaaaaattagccaggtctggtggctcatgcctgtagtcccagctgcttgggaggctgaagtagaacgatcgcttgagcccagaagattgaggtcgcagtgagccatgatcgcaccactgcactccagcctgggtgacagaacaagatgctatctcaaaaaacaaaacaaaaaacaaaaaagtgcttactttaccaccagagggtctggtctgagtctggaaggcctctgtgtaattgcacctcacacagctgtaggactggaagttgcttttgcccgtcacacaaatcttggtggccttcaacaagcggatgctggctgccgagataggcaagaggacattggtttatttagcacttgctgtgtggctgacttgatgctagatgctttactagcatgctttattttatgtctcggttcatattcacaatagtactgaaaggtaggcaccactgtctccagtttacagatggggttcgtgaggcttaggaagtttcagggagctctgcttaaacttagaaaactcatcagcaagtagcagatacgaattcagattccaaagcccaagctccctcctcctcataggtcagcttgaatttcataggatgcctgcaaaggtggctatagctctgcactattctgggtctcttttaagaggaagaggctggcctcagggagacccacaaagaccctccaagactgtcatcaccaaaccacacctgttccgattgcacctttatccatgctgattcttctccctgaaggtcctttcctcccattatctacctcttcaagtttcactcttttaaagcccaactcactcatgcaccacagcccataaccacagctgacaaagagctcactctgtgccaggtaagggcccaaacccttatggccacatctcacctaaagcaacctcaccagagaccctttccagctcctctcgccctatcccactcagatgaagcacagctcccttctgggactcccctgacattgtgcctgtgtctgcctcccctacccctctgaatcctcctgggtggagactgtaggtgactcctctctctgtgcctggcactcatggattcttgaccaggtagacttttttccgatctgaatttagcagatggaaaccaaaaggatgggcattaggatcccaggagtagctcactgaaagaactcatatggtgccttgcagcacaatcttggggaaatgccaaaagcttcgtgacgtcatctgggaagtggaaaagtaatctatctaagccagtgctttccctaaactgaagtggggtggggaaaatcatctctcgccttaccttatcttcttccatgaagtacatacacagaaaagtacacacataagtgtaccacttgatgcatcgggacactcatgcaaccagtatgcaggttaagaaactccctcaggtgtgctcctcatacttccttacagttattcctaccccagcaggaaccactaccctgacttttattttattttattttattttattttgagacagtctctctgtcacccaggcaggagtgcaatggcacagtctcaactcactgcaacctccacctcctgggttcaagttattctcctgcctcagcctcccaagtagctgggattacaggcatgtgccaccatgcctggctaattttttgtatttttaggagagatggagtttcaccatgttggccaggctggtcttgaactcctgacctcaagtaatctacccgccttggcctcccaaagtgctgggattacaggcatgmgccaccacgcctggtcttttgcttttttttttttttttgagacggagtttcactctgttgcccaggctgctggagtgcagtggtgcgatcacagctcactgcaagctccgcctcctgggttcaagcgattctcgtgcctcagcctcccgagtagctgggattacaggtgtgcaacaccacatctggctaatttttgtattcttagtagagatggggttttgccatgttggccaggctggtctcgaactcctggcctcaagtgatccacccacctcggcctcccaaagtgctgggattacaggcgttagccaccgctcctggctactatcctgacttctaaacactacattggttttgtttgcttggcactttctgtaaatgggatcatatggcatgtatgcctgcaggcatgcacacagatataaatgtacaaactcttttgaatctgccttatgtttgtgacattcatccatattgttgtacgtagttacagatcattcattcttgttgctgtgacggaatttatctggtgattcctttctactgttgggcatttgagtgctttctaatgttgcctgttgtaagtagtgctactgcgatcaccctagtatgtggcttttggtgcgtgtatgcatgtatttctgttggttatgcatagaaggggaattaatggttcatatagtctgcacatttctgatttagtagacactttgggccttatctctgatggatgcaaacttaccatctgcccggagtacccagcttacattcatcaaaattgaatagtcccctgttgcaacactagttgtaacaggttctactcggaggtccctcaagtctccsgggattagatcatgttgtagcatccactctggagatggccctgggaaaaagcaagacttccatgacactgtctttcccagcccagtctgatgccatgccatctcctctcagtgactcacaccaaaccttcccccattcacaattcctcacttctttttttttttaattaaaaaaattgttttttgtagagatggggtctcactctgttgcctaagatgatctcaaactcctggcctcaaatgatcctcccacctcagcctcccaaagtgcttggattataggtataagccaccacgcctgacccaattcctcagttcttcctgctaaggccaaatgtttcttagcgctggctgatttatagcccagataattttgatctaacagaagtactctcaacctcctggctttcacctacagagcacgtgggaccactccaggtrcctgtgtatgtacacatgtatatatttagtgtatttgacatgtttattagagtcaggcctgccttcctcaggcttcggccctggattccagccagctggcccacacagcccccactttcccacctcctaacctttgctggtgccatctctcctccagctcactcttcctacccacattttttgggcagaagcctacccattcttcaaatgccaccatctcaaacacccgctctcctatgaaacatttgcttctcggtcccaactctaagtgaccttccttccacggccttgatctccctctgcagagtggcaggcatcactttccaccttgtatggcaagtcccatcttgactggccaagaggctagcctgtctgaaacacggcctcattcccacagagccccagagttctgcttcgagcagacagagacttcatctgcatcagccaataaagcaatgggtcaccctgtgtctggtcttcgatgacctattgcctatattaggcttcctaaaagtccaactgtgctttcaatgtaaagccccaaatacccattctctaatgcacctaccagtttcagagccacattgaacggtctgtgggagagaaaaaaaccaagcgtcaygytgaagccggcaaaccacaagctttcctttgccaaattaggcagaacaccattttccccttaaatgcatatacaagtgacaaactttcaaagaaaagatgaactggttctgcttcacagcttaggggggaactaagctgtcccactgtaggctatgacggaccatggattagccatcagtatacctgatcctcaagccagtgcataacctcacttgaagaccacaggtgggtctccatctgtctctggatgtcatccttccctgctgcaagcaggggatgacttgggaccgatgtgaggccccttcacactctaatgtttaactctaggtttttaggacggcctagagtatttactgggctaccccaggttaaggagtagctatgctaaggagataaacaaaagaaagctctgaatgcagtccatggtactttcctcaggttctttaaaatgttccccttctaacacaaaaggactcactgagcaattcacgaaaccataagcaattattagtgttcaagaaaggctggtactaaatcgtttgaagttagctgctcgtgttttttcataagaaaaaataatttgtgctttggttctggaataaaatactgaacctaaaatattggggctttaggcagcagcaagctcaaatgacaagactcaatgtgatacgtccagcagctctggaatatgctgctgagcatccacatttccaaacaccttctaagatctccttttgatggtttgaatgatttgagtttgggcaaaattgtcaatcatttatttgtcttttaaaaaatgaactctaagggatatcatcagatttttttttcctttttctgagacagagtctcactttgtcacccaggctggagtacagtggcgcagatctcggctcactgcaacctctggctcccgggttcaagtgattctcctgcctcagcctccggagtagctgggattacaggcgcctgccaccatgcccggctactttttgtatttttagtagagacggggtttcaccatgttagccaggctgttcccaaactcctgacctcaggcaatccggccgcctcagcctcccaaagtgctgggattacaggcgtgagccaccgagcccggccagacttgacttttttttttttttttaacaaatgagccatcataccaggagctgagttcttatcaaatggccggtgagaggccaagcaacaaccctaaatgctaccaagctcaaattgttggccttgcagcaactacagcaaaagggatgaattcttccctttagtgcaaagagccaagagggcttctgaactgacacagaggggaaggataggagctgaagacatcaggaaacagtgaatggggtttgtccaccagcaggtgactacggagcttgatgctatatgctattctaagagggcagcggtatcatttcaaaggttatttgggggatgagctattttctcttcagtgacccagaagattccctcgatcattcagggtactggggaagaaaggcaactgccttcacgagtgaacatggcaatcaatatggccaaaaagggagggggtactaatggagaaacagttcttgtgccccaacaggtgagcagaccccaagtaacaataactacgtgccaggcccttcgccgctaattgcaggccatgtcgttataccttaagagaccctggtgggttcggtactgcccttcgttttaccgttcgggacttggaacttggtgagcataaatgacagaaccaacagtacagggtggcatctgagaccgggtctgtctgattcccacgcccctgactcaagcaacctgacgccgatgtccggggctgccctgagggtgcaggcatgcccctygagcyggcagtccgcgcacgccttcggggcagcctggactggcggatcagacgacgtcaggatctgggctcgagggccgggagatgagggaagaggtgctggcgggggcttaccggctctcggggtacggcgctcctgcacagcgcggccaggcttagcagcacgagcgacatcgccgggccactgcgcgggatccaggccacccgcacgctgcgcttttatcccggcgccgccgggccgccccttctcggctccgcctctcgcagcgccgacccattcccgccacccgaacagagggcgggcccgctggccccctcccaggctggggcaggtcgcagcgccctcgcctgctggggctcggagggatgggccgtgtccgagcgctggcggagcacgggccgccgcggcgcgcgcctaccccmgcgcacacgtgcatgcagtgagccaggtgcatcagctgcacccgccctcgggcttcgcgcgcctccgctggagcccagctagcctcgcggctccggggccgaccgggtcggaactgctgcgtccccattccggacgcagagagcgcgcggggcgccggcgccgccggttaaagtgccgcggggcaggggccgggccgcggccacccgctcctcccgctccggtcccgactgtcgggctctcggccgagtcgccccgggtgagtagccgcggaggcgccccgaccaccccgcagcagcgccgcccggccgctagcccggagaggcctgggggccggaggtttggggccgggctggacgccgagacccgggcccgctttacacaatcgccccgccgcgcgaagcgaaacgggtggaacgcagactgccgaagctcactgactcctttgagggagcgaattctttcagctacgcggggttagagcggtaggagtgcccgctgcccgaccccaggctttctggtaaatgtctgtttccaccaagtgagttcggacagcaacacctggggctcccaaagcggaagccgtcagcactggcgatttggagctgcggttctcaagtttccctggcccgggatctctagcgccgcctaaaatgagatccagacggcaggtccgggtcaggcccgggatctgcatttaacgagcctccacccacgcccccgtaattcgtgggtgggtggcccagggaccatcctttgagacacagtgggtttgggggaaagttcacaaaaatcagctgggctaacagtggagtcacagaggctggaactgctgcttcagccccctcggtttgcaaacgacagggttgtggtgaccaactcagggccatttaaacttgtaggcagaattagctccattctacagatgagaagacggaggcctagagaggggtatggaacttaggggtgtgttgtcagctggtgagaggctgtactragtcaagcagctgttttagctgaggccctacttgtgtgccaggcctggcccacctgccagcttgattaaggcttgcatggactggggatcagccaggggtttgggctctggcatgcatacgtgtggagttgcaggtagcattttcagagaattgctctgtttcctgaccaaggaactcagttgaggttgtggccgcacccctgcctgggactgggccaccctgagcccctcattccacctctctgagttgctttgggccctgtggcccttgagaacattttcagctctaatagtcatcttcctgttcagcaaatacctgctgggtgcaaaggtgaaccacacatgggtgctggctgatgggtactcctggagtgaggatgagtgcagtgagaattattttcaaggacacaagtacccgccttgctgcggaagcccagatgaaaacagcctcgtctgcaagctcaagattgtgaactttgtcccatggtgctgaggaacaatggtacaggcttaaatggtcatccatttttggttttagaaaggccacctggttggctctgcagggcaaaatagagggctagtccctctgagacgagcgagcaggcagccattcactaacatgcgttcattccgtgagtatctgattctgtgctgtgggccaggctctgggctgtgctggcttttcagttgtgtgccagggcaggccctgctgtgagcttggtgttgttcggcacacaggctttgagacaaccaggrtgcggaggttaggcctggagacagggttcatgagtcagactttctcagggggcagtggagaggagaggaggatagagccctggggaggagagcttgcctgaggaggtggggaggtctaaggggctgcagcaggaaagcccagtagtgagggaggagctcatggrgtcagatggggcagagagaccaagggcactgaggctggttggtggcagtcacaggaagccttggcaaraggataggggagggggttttgtaaaaagagaagggctgaggttctttctccccccaggggaagaagtgtcaggtgagggtggtctggaggtggctgagctgtaagaaggaggagtactcaggcaggggctgccaggcagagacccaagacccaggccaagtggctttcctgctgttctgggttcagaatgacactgccctggccccctggggcttagggatggggtgatacctggttcagtttcgtagttggggctgtggagtggaggagagggtgtgaagggccctgtagccacaactggaggttgaggtgggcaaacaggtgtgtctgcctgtcccctcrggggttttcccccctagctcagaaggccatgcctcaagtggccctgcatgagaggtcccaggtggcctgccggaaggcacacaatttatttggctgcctaagcctgatractttgtggctttttgaactggaggctctggcaagtcactgctcttctcagagcagtttccttttctgtaaaatggggtggtgataggggcgatgaagtgatttgagtctatgagagaagcgacctttggacattttctgaccttctcccttcagtcataaattctgctaggtctgggtttctgaaagagctaccagccagtgtgccttcctgtccgggggggctttgtagggggtgctcattaaatgcttgaatggatgaataaattaacacctaccttcatccaaggccagtgcctgagcctgcccacccaggggagctggtttgaacttcctcctctttcttcacaagcagagcaaaggtcagggcctctgccagagcctggaagatcactgggtcaagtacctatggccctgacccagaccctagggtctgcacagactctgtgcagccacagcgcggtgagatgcctggcttccagaccacctggttctgcggctcattcaccatctgttggccttgagtgaggctcttagtcttttggaacctgtttctccatctgtaacatggggctgacatcagttctgcctccccagcagggctgttaggaaacgcagaagaaacagcaaaacagcagataggaaagcaagttgaaggatttaagagtgctgtgtaaatttaggggcaggagaggcagaagcaaaaaaaaaaaaaaaaaaagggggggggaaattccctaggacccaagagtcacggtaatccccagattctgtcattgttattcmgacctttgcttctttgcctgatccatccctgggagaacaaggccatcagggtygttgacaagtcctgcgggtccagcctccacccacacaggtggaattttccagttcgttcttttgcaaatattaatcaaggccctggctggtcaacagtggattcattgtctygtgaagagtgagcygtttctggcacatactggctgtctcccagggcccctggtggtgagccggagctgggagaggaactgttgggagcactcctggcctcggtgctccctcaaccccatgttctgctccagctggttaagcttggcagggtcaattttaatgcctgctttgagggaaagaccctgaagccacactgagggcttgcaccccactgttcccagcagggctacaaaacacattttctctgctctagtaggaggggctggcccaggaaagcccgcagactcaggctaggtgttaactcagcgttaatcccactcctcctggttcctaggagaaaccccttgaggtcacatacatgtgttctgttcatggctgtggtccctgtgccttgtctcctgggtacttgcattgatttttacattgttgttatcacactggggtctcaaagaaagcctcggatgcagaggagacaggtactgttgtcgttctctcaaagctccatctgtaaacaggggtgatgaagttagcctcatagggctgcagggaggatcaccctgtcaccctacgttgggccgtatgttgggcacatgcaacaggatcggtggtatattttttgatccatgatacttgaatttatttgttattaataatatatgggtcgtagatgtagcatcacattccacactttatggaggaagaaacaagatgagtgaggctatgtaagaagagggaggatgaaactcaggccagctgtgaacttgayaaaatcactatgtggtttggttttagctttgcgcttttctttttttcttttttcttttttttttttgagacagartgttgtcctgttgccaaggctggagtgcagtggtgcaatccgctcactgggctcaagcaaccctctgaagtagctgggactacaggtgcacaccaccatgcctgrctaattttttctttctttttttattgtttagaaatggggtcttgctatgttactgaggctgatattgaacttctggcctcaagcaatcctcctgccttggcctcccaaagtgctgggattayaggcgtgagccactgcgcccagcctgtgagtttattttataactttatatttgtgatttgtgtgtgtgtgtgtatcatagttagaacagcgataccattttcaggagcacactagaaacctagggccatgggtgcaggttgatgtcttacactagtcccagctcctgattaatttcagtactttagtgatagagtgatttccagttgatacaaagaagcagtcagtttttcaaacactcaccttgcaatcttaggaccctctgcggttaaacccacccagaagtctgaagaggaaacagcagtgggcatgtgtgtgaaaattggctggctaaccttggctggccaaggtgctttgaccagcaggggcacccagcacacaacctggaccttgcagtgagctgtgaagctgccactgcactccagcctgggtgacagaggtgtctgctggaagtggctctgcttgtactggtgtggaagtgtgccaatgagcgcagaaaatcaaacaggctttgcagcgcctgtgatgtgtttataggaagtactggagtcggcgcagcagacrgtgggaagggaagatttgtcctggcatctgtggccaacctcctaagctggtggatttggggtctgcaggggttccatgtctggtccataacagtgcttctcaagctctccatggtgaaagactagatgactgtttttaaaattttaatctttcatgggccaatttttaaaatatgatgaaaattgttataataaaatggaagatatataaaaaagataagcccactatctgcttattagactcaacagacataggttgctgtgtcaaatgataaaactgtaaaagtttctaccctctgacttttgattctgtacttatctctctcagacaatcacaaagagtgtgtaggccagccccggtcacagagtgcaccgtatcctgtcacttctggatgtgaggtgggtattttttaactgagatttcaaaaagatgggttaaaagtttacttgaaaaaggaagctggcaatgagcatttgcagaacaccccaaacttctggggaatcgttggaaatccctcgctgtcggccaggccctgtgccacagagatgttcccacctttctgctttccttcactcctctggtgggatctgagatttcaaacaaacaacaactacaaaaatcctttttatcatggaagatttgaaacctgtataaaattagccagaagagatgatggagatgggaattttgtgttctcttcacataactttgttagcctcacctcgtgggggtcctgttttgtatgtccccctaatccctagggtgattgtaagccaaatcctagataacttttttttttttgagacaaggtctttctctgtcatccaggctggagtacagtggcaagatcatagctcacgtaaccttgaactcctgggctcaagcaatcctcccacctcagccttctaaggagctgggactacaggtgtctgctaccatgtccagctaataaaaaaatttttttgtagacatggggtttcacaatgtttcccaagctggtcttgaactcctggcctcaagcagtcctcccacctccacctctgcctcccaaggtgctgagattacaggtgtgagccacccttaaatatttaccgttagaaatagttgaattattctcttctagttattttgaaatgtataacaggttgttaactacagtcaccatactgacctgtcaaatactagatctcatttcttctatctaactgtatattagataattcttctatctaactgtctatctttaaccctccatcctcccttcccttcctgaactctgataactacccatctactccctatcttcctgagatccacttttttagcctccgcaccatgagtgagaatgtgatttttgactttctgtgcttggcttatttcacttaacataacgacctccatttccatcagtgttgctgcaaatgacaggaactcattytttgtgatggttgaatagtactccattgtgtatatggatcacatttttaaaaaatctgtttgtccattaatgggtacttaggttgattccatgtcttggctattgggaatagtgctgcagtaaacatgaatgtgcagatatctctttgatatattgacttcctttcttctatatacccagcccagtagtgggattgttggattatatgatatttctatttttagtgttttgaggcatctccatattgttttccacagtggctgtactaatttgcattcccacaaacaatgtacaaaggttcctgaaagggtgagtttaaacaacataactgcagaatcrtagtcatgtctgacaaataatgatatcttgacatcctcacatacgcactcagtgttcagatgagcagggtccagtgaagagcagcacattctcatggttggatcttgttcctctcacagcctgtaggcttcccttcctctctctcatctctctctcatttatccattctatacttggatttattgttgaagaactgtgtggggtttccctgcacttggattctgctgatgatggacctttgcaagttgctctgacctttgcgtttcttgtgagtcggtggattgatctagaagtgtgatcagattcaggtttgaacttttgggcaaggatgttttataggtggtattgcattctcccgttcagacccctgcctggactatacagagaagtcggtcttttaattgcctcatgtgtgtgaagtcaccttggtgagtccccagctgaccctcgcccatatctttttctccttctgctggtccgggctccccgcttgttctgacatcaccctggctactctgtggagagttggttctggggtagcctgaggaggcagcactagtagcagggacactgctagtatgttgtgaggagggtcccagtggagatgatggggcctgatccaggtggtgtccaaggggtggacaaaagtgggcagattctgcagcaccagcctcatccttatgagagaagctactaccccctaggcctctgcttctgtgtctgcttttcctccccggatagtgcatttttatataccagtcacatgacaagcgtttattgagtgcctgctgtgtacgtggctctgggagcttctagctctccccmactgctgtctgtaagtgaatgcacatggcaggaagagcagctccatgatgggctctgccaggtgggagcttggtaactcctggcctctgaagcctgcccatgaggagagccttcatctcccctggagagggaacagcagttgtctttcttttgctgctatgtgactgcataagagctgggacaccagcgccttctatcccctcggtctgcctctggctgtgctccgggttacccatacccacctccctactttcacccgaggccctctgtgctgcagatgccactcacccaggcacagtgcagcccagagtgcagggagtacacatctggagcacagtggccagtcttcctcaggggccagcctgaggcactgtatcccccatcccctagtctatcaggtgcttgactctgggaggggcccctaagggattcgggtctccccagcagcgacctctgttgtaccctgcctcctacccatggctgggcgcccgcagcacctgcacagactggatccacagacacgcctgcaagggagaagaaatagtaggttaccctgaggagccatccgtggaggttgagcggcctgggccccccacccttgcctgggtgttagaactccaggtttccaatsttacagtctctttttttttttttttttttttttttttgagacagagtctcactctgtcgcccaggttggagtgcagtgatatgatcttggctcatggcaacctstgcctcccaggttcaagcgattcttttgcctaagcctcgagtagctgggactacaaggcgtgtgccaccacacccggctaatttttgtatttttagtagagatgaggttttgccatgttggccaggctggtcttgaactcctgaccttaggtgatctgcccacctcagcctcccaaagtgctgggattacagatgtgagccaccgcgcccggcctcccaccttacatacactctgcttttggtatagaccaccgtgaaggttttagaaagtggtgaagcagctagagagtggagggatgtgtgcagagggcagaggcctggaatgtggagcacaaggttcccaggctgaggaagcacccacagtggggcagcagaggggaggcaggagggcagacttacttcagaggagccacaggcatcggaggtgcccgcagaggccagcrcccacgccttaccaacaggaaaccctgccctgggtcacacggtgcggcctggcagagctctgatgcgatgtcagacttcagggctccacctcgggttttgttggcagcctgtagcctcagcccagtcccatctgcccctttttaccaagaggatccagagggcaggtgggctacrcccgagcagccagggcacaaggggccaagtggtatggcctcgtccacactgtccagaatcatctcccaggtagcagtttccaattcagttgttaattatgtatcaatatgtgggagatgagattcctggaaagagaaacttgacactaaagaaaatgcccttttttttttttcttttagagacagggtcttgctctattgcccatgctggagtacagtggaacagtgctagctcactgcagccttgaactcctgggctgaagtgattctcctgcctcagccttctgagtagctaggactataggtacacaccaccgtgcctggctaattaaaaaacaagtttttttttagaaaaaatttctgggttttgctatgttgcccaggctggtcttcaactcctcaactgcatcaagcaatcctgcctcagcccagaaaatgctttcaaaaaattgttttaaacattttaattgaggtgcaacagacatacgaagtgtccatcatgttggttttgatctgtgtgtatgcctgggtaaccatcaccaggtctggatctagaacattcccagggggtgccttctgttggtcctggcacaggtgtatgagctcagcatccacatctcagactgcgcaggttgggtttgctgtaggccacgtgcagcctcatcccctgcatgtgtccccttggccagcatgacgcagcgccagcctcaggccaagctcagcacatggtgggaggcaagggcgtggagccctcagccagggatgtgggctttccacagctcatctcactattagcctgttgaggtcccagtaagtggcacagagaagtcccaggatggatgtggtcagtggtgaggagggcaatccatgcctgagggaaggtgaggagtgagtaggtgaaaggaggttagcacctgtacctggaggagagaacagcatgtgcaaaggccctggggaggaagggaaggtggaccatgcacctggatcccagggagcgatgctcacagtgggatgatggctacagaggccggggcctggcctggtcgggcttaggacaagagggcctggggggccatgaggaagcttgtcccactgtcttagggagatggaggcctgggttgggggtggcatgagattcctgagagaggaggagcagctgcccagggttactccctggaccaccaccgcctctgggcccagccaggtctcattctcaaactgggatccttcccaccctgggccactgcactgcactcccctcagcccaccacagggctgggtattcagacggttgtgctcctgggaggctctgctgggctgtaggaaagcagccaagccttcttggcttgagacccctggcatgggaacttggtgtcttgcacctttttgcatgctgactatgaccttttggcttctgtgatgtggctttgttggctgggcctgtggtggagggggtcccagcctttggcttgacatggggcaggggctcgacctcttcaggctcgtttccctctctgtgacatggggctgatggtgacggagtgatgatgaagaccctccaccccacccagcatctttggtgacttaaatgtgataacccatgtgacgtgctcagcaggggtagctgctcctgttaatataactcagtttggtcccatggtttaatggagctgtatgatcagataaaggcagccacagagcagtgtgttcttacccacacaaagcccagcctagcatgtagggaatcttgttcgaggtctcacagagattgcaggtcaaagccagtactagaaggccagatggaaaaaagcaggtgacctgccctgaatcctcctttggcaaatgacccccagatgggcacaggtggccatggcccttaccacatgttttgcagtttccccaaaagactgtcatcatcagcctggsctgtgggcacagtgacaggtgtgaaggtcaagtgcaagcctggggcagtgctgacttcagggtgccaagattcagggctgtaaagtaactttctgggctttgaagctcatgagtagctgagctttgtgctaggcctacctgagccttgtccacaatgggctatggtggccactttttaaatgtgttaacagggtcctttcatgtggatggactcactttttaatgggcagtaccctattaggggagtgttaggttgtttataattctttgccactgtaaacaacacagggacagggcccttgtgcttgtttttctatggttgtgcagagcactctcttgattaaattcctgtaagcaggattgctgagacaaagggctatacctttaaattgcatctgtttttctggaaatgttgacatgctcccaggttgtccccaaagtggaatcattatttatcattggccttgtccagcctgagctcctcaaaggctgagcaagtttgaggcatcattttgcatgcaggactaggctggtgtggctcggcctctctccagagttctgtcttctcctcttgggtgaccagtgaaagctaggactgtaatggccaaaggatctaatcctacagggcacagtacactgcactggccaagagctagaaagaaaacatgtgtgcacaccaagatgtggtgaggaagaaagtgctgctgggaggcctgtgcgaagggccctttcaggaagcttcctcagtactctagctgtgcgactctgcaggcagacatgttgcaagtatgggtactcctggaatggtgcgtaagcatcttcttctgggcatgatccttttgcaacttcactctaccaaagttataaaatgtcttgtgcaattggccacatgctcaaaattacatggaaatctgtcttgtcgtataaagcaatccgttttctgaccacaaaatktagcaaacttgtcaatagcagtctttggctccttttttttgtttttttgaaagagtctcactgtgtccctgcaggctggagtgcagtggtgcaatctgggctcactgcaacctctgcctcctgggttcaagagattcttctgcctcagcctccagagtagctgggattacagatgccttattatgcctggctaatttttttgtatttttagtagagacagggttcaccatgttggccaggctggttttgaacttctgacctcaagtgatccacccacctcggcctcccaaagtgctgggattacaggcckgagccactgcacctggccaatttttgactactgatttgagaatttgaaatgagaattgttagctgatgcaacaaagggctatggcaatgaaagccaccagccataaccagtaggacgtggtggcccccatgtttgttactcctctctctgcttgatccacccactgtggccatcactggcattgggggtgggggtttcaagttgaccaaagccttgcctcccacacagtggtgctacagggaccaggtgtccagcaccaaggccagccggccagatggaaggtgtggcttggtggggctgcccagtgccgcgggaggactcatgtcacatgagtcttttcctcttgactggaaggtagagcaggcaaaagtctgttcttcctcgtgcttgtcagttggcaaagccacatcttcctcttctggtccaggcactagactgggcctggacatggttggtttcaggaaacagagtgggctgggagtgcaggcacccagagtcaaaagggaagccttggatgctacctcaccaacttcagaccccacccatggcagggaggactccgaccccaacacatggaaatgaacacgcatgctatcctgtttttccctgctcccattcctgcccaccttccatcctgccaatgccaggcagctccttccctgcccaggcagcccagggaagtggaaggggctgcttccctggaactcctacctcacaccagtcagtctgcccacccacccagcctgcgggcctgagagggcactacgctagcagcttaggagtccctgtcctcaaggagttccctttgggtagcaggcccctcccttgtgtggggagggtgggagtatcaaggggaggtgttggagcagagttgtgatacggggtggggttttcaaatgattgggacccggaagagtaaatgacctgccgccacctcaggaagaaggcgtctgtcttcactcctgcagggtaggcttgctgccccctggcgaagctcctgttttgcctcttgatcttgtcaattttaattattgtcatttactgcagaccttctgtaaaactacacaacaacaaacacacatgtgcctgtcatctagatcaagaaataaaatgtgattggtgcaaatgaaaacccccaggaatgcctccctgctcagaggttactactaccctcaagtttctttatacctttccccttcatagatttgatttacttaacaagatccagaattcagtcgcatgtaggattttgttggtgatttaaccattgtaagcgtaattcagtggcattaagtatattcacaatgttgtacacccatcaccactatccgtttccaattttttttgcatcacctcaaacagaagctctgttcccccaaacaataactccttgtttcccttcccctcgtctcctagtaacctctaatctattttctgtttctatggatttgcctattccatagaatcatacaatatttgtcctttggtgtctggcttatttcacttagcataatgctttcaaggtccagccaagctgtagcatgtgccagaatttcattcctttctaaggctgaataatataccattatatgtacataccacattttatctactcacctgtttttttttgttttattattattatttttttgagatggagtctcgctctgtcgcccaggctggagtgcagtggtacgatctcggctcactgcaagctccgcctcctgggttcacaccattctcctgcctcagcctcccaagtagctgggattataggcacccaccaccatgcctggctaatttttttgtatttttagtagagatggggtttcaccatgttatccaggatggtctyaatctcctgacctcatgatccgccyaccttggcctcccaaagtgctgggattacaggcgtgagccaccatgcccggccctactcacctgttgatagacatttgagttgttgccacctttttgctgttgtgaataatgatgctgtaaacattggtgtaagaatatctgttcaagtttctgctttcaggtttttggagtatatacctaggagtggaattactgaatcacatggtctgtgttagctttttgaggaactgctaacctgtcttctacagaatttgcaacattttacattcctaccagcaatgtgcaaaggttcccatttctccatatcctcattaacacttgttacttttctttctttttttttttttttgagatggagtctggctctgttgccaggctggagtgcagtggtgccatctcggctcactgcagcctttattatagccatcctgatgggtgtgatagccatcaggatgggtgtgaagtggcaattcactgtgattttgatttatagtttcataatgattagtgatgttgagcatcttttcatgtgtttattggccatttgtgtttctttcttagagaaatgtctattcaagtcctttggccattttctatttgagttgtttgttgttgagttatagttttaaacacattctagatattaacctcttatcagatatatggtttgcaaatattttctcctatggattgtcatttcattcttgagaatgtcctttgatgcagtaaagtgtttgattttgatgaaatataactttcctacaggtagggtgacacaagcacccctgtggccaccaacactgggactgtgctgggtcagacctgaagtcagcacaggactgggtcttgcccaaggcctgctgtaaccactatgtggctaccgcctgtattcacamaaggccccagggctctacagttagccagcggtgaagccagccaggcttgtggccttccctttggggcggcaagtttccccaggccccgggcagatagagatgctttccgggagccaggtactggagtcaaaaacattagaaagctacctcgtgttctattctactgtagctgagctggcactcacaccatgtgacacagtccttcccacttttcccttttcacaggcagaggagcctcacaccatggcgaccaccacaggcccacagggaggactgccaggataccaccagcattcacttaaggcccaagggctcttcagtcagcttgtggtgaatgctgccaggcctgagactcacccttcagggcagtgggctcccctctggcccagggttggtccggaaaggccacttaagagccaaggcctggaatcagggaacccaagagccctcttggtgctctcctccactgtggccaagctggtgcctgatttttggttgctatgaaattgctccctttgtgcagatagttgtcaaacttggtgttcctgtgggggtggggggcgagggggatgattgatggagcaaatagagatttgccatcttgctcttctcctccctgatttcagtcttttaagatgtattaagatttgttttgttgcctaacatatggtctctcctggagaatgttccatgtgcacttggaaaaaatgtatattctcttgttgtagtgaatgttttgtatatatctgttaggtctccaactggtttatagtgttattcaaatcctctgtttccttactgatcttctgtctagcttctgtccattattgaaatctgagtattgaagtctccagttattgttgtaggactgtttatttctcccttcaaatctgtcattgtttgcttcattttggggccctgatatttggtgcatatatgaattgcatgttttaaaacttcacatatatacaaatatatgtgaagatatatatatatatatataatctcatttaggccacagcctcttataatattctttttgtgtgctgaatatatttttaggattcatccatgttgatgtgaggwgctatgtgtccttcattttcactgctgtctggggtttctttgaccaactgaactatacctttttctatgtcctttatatttccacatacattttgaaatcagcatttcaatttccaccaaaaaaaaaaatgcctgctgggattggcattgcatcgaatctataaatcaatttggggaaaactgacatcataaaaatattgggtcttcctattcgtagtatttatttaggtcatctttaacttctgtcaatgttttgtagttttcagtatataggtcctgtatatattttaagtttattactaagtatgtcatgtttcctggtgctcttgtaagtgttattgttttgtcttgtggttgcccatggagggtgggatcaaccccccaccacccaaagttggtttgaatgttgagactaatgacatcacacacacaccaagtggctaccataaggtttattgctcacataatggagctttatagggtgaggagggcaagcacccaggcttgtctgtgaaggaagaggtgagtgttcctggttattattatagttagggagtggagtcaaggtgagaatcccacacgtgaattggatttgcatgacttgaacctccctgttgatactccaggcaggaatgccagagcttttttattcacttgcccaggtgtggggcaagaggggaagagggagggatggagcttgaaagctatcggtagtcaaacatcaaaaatggagtcaggctctattatagttttaaaatactgtttaaaaaggcagtttcaggctcacagcaaaatcgagaggagggtgaagagakttcccatataacctttgcccctacacgtgcataatcctcccattaacaacatcctcgcactaaagtggtacatttattacaaataataaacctatattagcacatcattatcacctaaagcccatagtttacattagggttcactcttggtattgcacattctataggtttggacaaaaatgacctgtatccaccactgtacagaaaacagattagttccccgccctaaaaatcctttgtggcctgcctgtttatccctctcccaactcctggtaaccactgatcgttttactgtctccatagttttgcctttttcaggatgtaatatcgttgaactcatacggtttgtagccttttctgattggcttctttcgtttagtaattatgcatttaagtttcctccttgttttttcatggctttctggctcatttctttttagcactaaatgatattccattgtcaggatgtaccacagtttatttatccattcacctactgaaggatatcttggttccttccagctttgggcagttatgaataaaactgccataaatatttatttcctggtttttgtttggacatagttttcagttcctttgggtaaataccaaggagcacaattgctggatcatgtggtaagagtgtgttgatttttacaagaaatcaccaaactgtcttccaaagtggctgtaccatttagcactcccaccagctatgaatgaaagttcctgttgcctcacatccttgtcagcatgtgatgttgtcagtgtctggattttggccattctaatatgtgtatagtagtgtctcactcttgttttaatttgcattttcctgatgacatatgatgtggacgatcttctcatatgcatctttgccatctgtctgtcttctttagtgaggtgtctgttaaggtctttgggccattctttaatcgggttatctgttattgagttttaagaatatatttatttgtgtatttacatagtagtcctttataaggtgtatcttttgcraagatttacttctcgtctgtgacttgtctattaattctcttggtagtgtctttagcaaagtagaaaactcacatttgwttgaagtccagcttatcaattatttctttcatggactgtgcctttggtgtcataatatataaagtcatcgtcaagcccaaggtcatctagaggttctttctcctgtgttatcttctaggagttttatagttttatattttacatttaggtctgtgatccattttgagttaatttttgtgcagggtataaggtctttgtctatatttactckgtgtgtgtgtgtgtgtgtgtgtgtgtgtgtgtgtctagttattccagctccctttgttgaaaagactttcttgctctattgtgctgcctttgatgacttgtcaaagaccagttggctacatttatatgggtctatttctgggctctctgttctgttccattgatctattcaccaatatgacactgttttgattactgtagctttatagtaaatcttgaagttggttagtgtcagtcctccaattttgcgcttcactttcagtattttgttggccattctgtgtcttttgcctctccatatatactttgaaccagtctgttaatatctacaaaataacttgctgtggttttgactgggactgcattgaatttgtagatgaagttgagaagaactgacatcttgacaatattgagccttccaatttgcgaacatgaaatatctctccatttatttagtttttaaatttcatcagggtttcatagttttcctcatatagatcttgcacatattttgttagatttatacctaagtatttctttgtgatgcttatttatttatttaggggcagggtcttgctgtcacttaggctgaggtgcagtagtccaggctggagtgcagtggctcaatcatacctctctgcagcctcaagctaggactacaggtatgcaccaccacacccagttactttattttttactagttatttatttttttagagatggtatatttagtctkttctctcattgctataaagaactacctgagactaggtaatttataagaaaagaggtttaattggctcatggttccacaggctttacaggaaacatggcttgggaggcctcaggaaacttacaatcatggcagaaggtgaaggggaagcaggcatgtcttacatggctggagcagtaggaagagagagaggaggggaggtgccacacgcttataaacaaccagatctcataattcactatcatgagaacagcaagagggaagcctgcccctataatccagtcacctcttccaacattggtgattacaattcgacaagagatttgggtggaggcacaaatccaaaccatatcagayggggtatttctatgttgcccaggctggtctcaaactcctggcctcaaatgatcctctgaccttagcctcccaaagtgttggggttatatgggccactgcacccagcctggggtsytaatttaaatgatattgtgtttttaatttcaaattccacttgtttgttgctggtatataggcaagcaattggcttttatatattaaccttatatcctgaaaccttgctataattgcttattagttccaggaatttttgttgattcttttagattttctatatggacaatcatgtcattagcaaacgaagtttcatttcttccttcccaatctgtaccttttccttttcttgtcttactgcattagataggacttccagtacaatactaaaaaggagtggttcaaagggacatccttgcttcgttcctggttagtgagaaagctttgaattttttaccgtcaggtatgatgttagttgtagggtttttgtagatattctttaccaagttggggaagtttccttctactcttggtttactgagagtttctatcatttaatggatgttaaattttgtcaaatgctttttctgcatctgttaatatgatcatgtgagttttctttttcagcctgttgattatttttgaatgttgaaccagtcttgcatacttgagataaagcccacttggttgtggtatataattctttctatacatactttgattcaattttctagtatttttgttgagtgtttttatctatgttcatgaaagatattggtctgtagtggttttttttttttattgtaatgtctttgtctggttttgttattagggtgatgttagcctcacagaatgagtcaggaagtaatcgtctgtttctatcttctagaagagactgtagagtactggtataatttcttccttaaatggttgatagaaatcaccagtgagcttagtcaagcttggtgctgttttggaaggttatcaattattgattcaatttctttaatagatataggsttatctggagtgtctttctgcttgtgtgagttttggcagcttgtatctttcaaggaattagtccatttcatctaaattatcatctaatttatttttaaagatgtattccctgggtataatttttcaatttcagtaaactaggactagaggtttttttttctttcaatatttaaagttgtcactccattatcttctggattgcatgttttctgagaattttactgtcattgttatatttattcctctgcatatgttttttgtctggctacagtgatgattttctctttattttgaagtttcagcagcttaactatgatgtacttagatgtgtttttctttgtactaatcctgcttgggatgctctaagcttcttgaatccatagtgttttgtcttgcactacgtttgggaaagtctcagcaattatctcttcaaatatttctcctcccttgttctctgtctcttctttccgccttgccctccttccccactatttccccctcagactccagttatctgtactttagtttgatattgtcccagagttgttggttgttttttctctcttcccctctttatatttccagattcttttctgtgctatatccaattaaaaattgttcttctctaacattgtatttttttcttgcatttatgtttttttctatagttttcattgtttggctgaagtttcctatctgtccaccttttcaactatatcttttataatgctcaccttggttaaagtccctgtttgatgggttctaacatctgggtgcattactccttggtctgtttctgttgactactttatctcttgataaggagtcattatttgccttgctttttggtatgtatcctaattttttattgaatgctagaccttgtgtgtaatgggatagtggagactgaggtaaacagtatacctagcaaaggacctgtctttcattctgttgggttgttagtgtggagtgttgtcagtctggtggggagtggtgtggggcctggagctctgaagagttcttctcagtgttccagcagcctcagacataccattcaggaggccccgccacctctgtctcctatgcctgtgcaacggtggacgggaggaggagaaagagcctctgcactccagtggtaggctgctgttacttggtgcagggcttgtggaaggggtggtgagatttatcagggtttccttttgtttcagcctgtcttgggcaggccttgttggtctgagcctcacgggtggggtgttctcaggtgttcttttcaatggaggttttcatgacatatcctgtttcttttctacctctgtgcactatgctgggattgatttgaacattgttaggaaagggccctttcaaagctattgccatttttctgttaaaacgctagcattctacagagtgatctttgaagagtgtagctctgatcttgaacctgcttcaaatccctctagtgctccccatggcccctcgggtcaaaggctttgagctctacagtctcgtgcctctcatgctgatcttccttcagttatttaagtcttgtccttttcccaggccctaaaccatccgttttgaragcagatgtctttctgtgtattgctgcaggaactgggtggggcagggaacagtgcctagcacatggtaggggctgagcccactgtcttgaagggatgagtacaaatactctgttttctttctcccttggaaagccctttgcccscctgccttccagcaggcagactccagcccagtctccaggttcatacacagggcacagggaagcattttacccctcagttgggggaggggcctttctgctgccccatcccctggcctgtgcctgtccatcctggcacatacaaaacagttctgaaattcctgtgtgtccctcacttcctcctcctagttcctttgagcagccacatcaggctgggcctgctgcaccctgtcccngcaggccgttggtgagcataccctggatatgcggagttaagatttttaaagcccctcttcctgttttagggagaagtgagtcatctcattcccctccgtggatcagaggacttggactagatagaagcatgtggtgtctcctacgaggcctgggccggcctggagccctggcacggggagcyctggggcagcagcaatccctgggtgcccgggccctggccagcgcaggctctgagagccgggacgmgtacagctatgtggtrgtgggcgcgggctcggcgggctgcgtgctggctgggaggctcacggaggaccccgccgagcgcgtgctgctgctggaggccgggcccaaggacgtgckcgcggggagcaagcggctctcgtggaagatccacatgcccgcggccctggtggccaacctgtgcgacgacaggtacaactggtgctaccacacagaggtgcagcggggcctggacggccgcgtgctrtactggccacgcggccgcgtctggggtggctcctcatccctcaatgccatggtctacgtccgtgggcacgccgaggactacgagcgctggcagcgccagggcgcccgcggctgggactacgcgcactgcctgccctacttccgcaaggcgcagggccacgagctgggcgccagccggtaccggggcgccgatggcccgctgcgggtgtcccggggcaagaccaaccacccgctgcactgcgcattcctggaggccacgcagcaggccggctacccgctcaccgaggacatgaatggcttccagcaggagggcttcggctggatggacatgaccatccatgaaggtagtggtctcccttctctttttaaaaaagcactaccccctaccccagcccccacccatcttggcccgtggctccaggctcctggctccagcatggtcaggaggcatgggcagactgaggctggcacgaccgggaagagatctggcttagtatacccctccaagagtacaacccrgagccctgagagtgacccaggatggtgaccctgggcgttctctgcacctctggcccctgttggtgtggataacagagaatcagctctctggacagagagcctaactcctctagggacttgcacatggggaaactgaggcacagagtggtgaagggccttgctcacagcaggacagaggcgagccagggctgacccggggcttctgcctgcctcttgaaggctctcacccctctggctgtgctcctggtctctgtgtcctcctgtttgagggtgaagggtacttttccacctgcctccaggggaccccaggcagatgtggactcagtagggcagggtcttgcagggtctttccrtctcagctttactttgaaggcgggacttgcagtcagagctgggcatatccactctttctttctccagctccttcctcctgcccaggtgccaggggagggcggagccatgcctgaccacctcactccatcctgcaggyaaacggtggagcgcrgcctgtgcctacctgcacccagcactgagccgcaccaacctcaaggccgaggccgagacgcttgtgagcagggtgctatttgagggcacccgtgcagtgggcgtggagtatgtcaagaatggccagagccacagggtgagtggactgcagctggggtcctggaagaagggggtgggcagtgaccytggtggtccagctcagagtgggcaggagtcacgccctcacccccagacccacgtgctcatccctgtgatggcggggggaggggcgagtagctgatggcagtgggctggtggaggtgaagaagcccctagtcctgccaccgagaaagggcctatggtgtcagtgcccctgtgtgccatgcctaattcagagctctcccccagtaccttccacaccatttcaaggcaccgatgtcacagaaagctataggtttaaagctataggtttacactagaggttttaaaacccataaatgtgattgtactctatttctgtgttgttggcagggggtctgattgttttgcagcttcatgtgtagatctggttcaccgcttgctctctctaaaccacccacttgaatgcctgctttcatttatctcatgtaagccctcccctcctgtttctaaggctgtcactactgtccagctgtagttgcacctgctggttgctttcaagtagtgactcagtgagtttcctctccttagctctggggcctgtcccgggtgtgccacaggattctacatcccaaggctgtgttctcatggtgctggctagagtagggcgctggtctgtgagtcaggagaacagctggcttttcagggagtgacctggctggacctcttccaggcttatgccagcaaggaggtgattctgagtggaggtgccatcaactctccacagctgctcatgctstctggcatcgggaatgctgatgacctcaagaaactgggcatccctgtggtgtgccacctacctggtgagtccccttctttactgctccccagaggctgtctctgctcaacaaaaggcttagtgtatgtatcttattagcatgaagtggggaggtggtggcagtcagtgatccttggaactatcacattgtccccgagagccygaaggtttcccaggcctcactggacactgtcatccctgggccccgagtcttgcattgttttccttctccctcctccggctgccctatttcatttggagaagggcaccctgcagcagggagtatctgccctgaagccccactgggtcgggcatgggcgtgtcaccagggcagctctatggcragaggggtccaggcctcgtccttccatccacaggactcgctggctgccctgagcatgaatgaggtcagctccgtgctccagagcctgctcttcatgttaagatgtaaactttgttttataaactgtctctgatgctcttgagggtcgggctctgtctcttgccctccttgataaccccactccgggagggctaggcctttgtgcctttaggcttcatcatgaggggcccggggaagtgctgcttcatgatgttgacctgcccagtgtcccaataggcttggatgaattcatgcaaggacggtgtagcacgacagggctgcttcctccttccccacgctggcgtgagggtggggctgctgtctgcccctctggccatcaccatccagcaaccgctcaccaagcagtgcctgctgaaggcgtaggccctgccctcacagagggggctgctgagcagggctgacaaggggcacccagaggctgccgtaggagtgagtgacaaggacaggtggccttggcagcatccgaggcaggccagacttggccaggagtgcacacatagtgtctctgggaggcagcctttaagctgagaccagggaactgagcaggagctggtccagaagataagggaataggaaagaatttttcaaaaccggggggatattgagaagcagctgagcccccttggtagccattttctaaaccactccttcccgtatcaggggttggccagaacctgcaagaccacctggagatctacattcagcaggcatgcacccgccctatcaccctccattcagcacagaagcccctgcggaaggtctgcattggtctggagtggctctggaaattcacaggtgagcacgcttaccagtaacctgggaggagactgcctataagcattgagacctccttcctgaggagctgaacaggggttctggccactgggtttgatgcggaactatgccatttaccttagccctgagcctcagtttttccatcttcaaaatggggatgcacagtttcaacctgacaggttgaagcgaggaccagaaacaatagcacatgccaaggagcttggcccagggcctgctggaggtgagactcctcggggcttaggggctgctcctccttacggatgagcagggatggccttgtgctggacagcaggtgaggtccaaggagccaggagaaaaggtggagagaggagactttggggctagactgcagaatcagcattcatctttcaaccttttccatttgatttctagctgtgcctgggccaggaactggtagtttaaaatcctacccatccactcagtctgtatttctcacacacctagtatgtgctgtgtgctgtgctaggtagtgggaagagccggtaaggcaggtggcatgggcagtggcagaattggccctggtagagagcagagctgatgccatccttttggcaaatagctgacattttatggtgtggtgctgggtgagccccctgtgaggggtgaacagatgtggacaggacttgggtccaggcactagagtggagtccgggaaaaggaagaggagcggccaggagaaaggagggaaaccaggagcagccggcccacctgccacgkcctgactggctcttctgcctcatcctcttctgcttctcaggggagggagccactgcccatctggaaacaggtgggttcatccgcagccagcctggggtcccccacccggacatccagttccatttcctgccatcccaagtgattgaccacgggcgggtccccacccagcaggaggcttaccaggtgagcaggtggaagagcctcggcttcccaggatgtctccttcccaccaggaaggaagatgctcccatcttccaaggcagcattctccctggtgccatatggctgcagagtgggggacacagaggcctgtcccctgccttccagctgcccagcgtgtcagtctgcgtggtgcatgccaatggtatgactgtttcatgcaggctaggtaccgagcaccagaaatgggacaaacagaggggctgacttggctctgggatcaccacctctgaaagctttgagccatggagtatgaggccaggatgaaagagtgattccttgaggtggtctgtaatcactcgtggaggtgggtaccatgcgggcaaatgctaacatgcatctgttccccactgattctggaagcagaggcccaccctacaggtaaaccagggttgacagaggtcactgtggatgtctatggagggaccgtcactgcttcctctgtgttcttctaggtacatgtggggcccatgcggggcacsagtgtgggctggctcaaactgagaagtgccartccccaagaccaccctgtgatccagcccaactacttgtcaacaggtacttcacccacctgtgtcttcctgggcttgaacaaacgaatgyctttgtggggttccygtttatccctgaatcatacccttggactacactttctaggacacaagtgaccctctgtcgtcccccaccntgtcactttaggctgtaaacttgcataggcagccccgtagtgtcctgggacacatgagataaatgaagtcccagggtttagacagtaggggagattttcagctttcagaacaatctgccatgatgtgcagggagaccacgccatgcaggtgccaggtctgtaggtagagcatttttcctgttgtcactctgagcagtctctaaaagcaaattccattcctgggcctgcctctttgcatgcagcaaaaacgagcactacccactgggcaggttttgcccagcagtggctgcagggtgctcacagccccactgtagcaggggcagggtgtgtgtacttatccctgccctacagataagtcagatccctgatttaaacctgggcctctgggtgggctgtgtccgtgtaggatgctacctttgagctacacggtacagtctaacccgctgtgggcagggacaagcagcctgctggctcagtcccccatggccctgaactttgtccccaaacaccatcccctcagacagcttacagagcctctccatgccgtgaatcttccagtgaggccagcacgggcaaaaggaggggtcctcacctgtttcttctcctcgacagaaactgatattgaggatttccgtctgtgtgtgaagctcaccagagaaatttttgcacaggaagccctggctccgttccgagggaaagagctccagccaggaagccacattcagtcagataaagagatagatgcctttgtgcgggcaaaagccgacagcgcctaccacccstcgtgcacctgtaagatgggccagccctccgatcccactgccgtggtggatccgcagacaagggtcctcggggtggaaaacctcagggtcgtcgatgcctccatcatgcctagcatggtcagcggcaacctgaacgcccccacaatcatgatcgcagagaaggcagctgacattatcaaggggcagcctgcactctgggacaaagatgtccctgtctacaagcccaggacgctggccacccagcgctaagacagttgctgctggaggatgaccagggaagccccctrataagccaagagggccagcacagcccttgctcccaggctcctgcctgaaactatctagcacactaggacccaggtggtaccctactcagtggctgagaattggataaagtcttgggaaatgagacaagtactgggcagtgaatccagctccttttccccagcctttccctgtgggccatttggggaaggccagcattcagcctgagatgttcctccctgcctcctggagggacagaaggggaggatggttaactcctgccrcrtcctttttcttgtgttcacgtggcattctctaacccagggcagtggttccttcccaggccatgcacagaggctgggtgcctgccagacccacggagggttcgcgaaggaaggggcatcctccttcttgagctgcaagctttagctgaggcagtaagtcacacagtagttagttcagcctgggctggcacataagtccccagtgtccctgttgagaggggaaagttgcctgctggttgaaaaactggcttttcctttctcgctgcctaatttcactctcagagtgaggcaggtaactggggctccactgggtcactctgagagggttgtggctctggttcttattaaaccagggccaggtgcagggctcacacctgtaatcccagcactttgggaaggtcacttgagctcaggagttcaagaccagcctgggcaacatagtgagaccttgtctctggaaaacaattagctgggcatggtggtacacacctgtagtcccagctacttgggaggctgaggcgggaggatggctttagcccaggaggttgaggctcctgtgaaccctgatggcaccactgcactccagcctgggtgacagggtgagaccctgtctcaaaaaaaaaaaaaaaaaaaaaaacctgagatttttatggaccttattcaaggggagaggagtctggagggaatgccgcttggcttcactaccaaaggttttatgacttagcattttaaaaggttttccttttaccaagaaatgcagaaaccaagagcaaaccccacgtaccagatcactgattcctactgaagcagctagcccgagaaaggactctctcatactggtcttgggaaatgacttggcagcctgagccatcccagcagtggacaaggatggttaattcttattctgtagacgtccacaggaacagactaggatggaaaacacagttaagcacagccatgcaccctgtggctgtagaaatgcccctgtgtgaaagaaaaataaattcaagactggagttttggaggaaaaaaaatacaagtagcatttacaacagctctttgctctttaaatttcttaccattcaataaagtgatccagtcactcacatttgaactgagatgccttctccagactgttctgacaaggtaatgaaaataaaatgcacttggatttttccagacatccacatccaccgtcaagggctgggaagaaaagcattgttgcgtggaaacctgcagctatactaggcccagaataaggacgggaggaaattgggggattccaggctttgctcggatctgagaggattggggcggcttacagactggggccgggggggggggcgtccgacagccacaagttagttttctgagaaaaaccttcgagagaggcagcaggaagaaacccatcacacctctccttttaaaaatcttaagcagctcttgtttaatcttacctgtattttttaaaatttttgttcgaagagagggtcaagaaaaaaaattctaaaccggccaagagacttatttctcctacggagggtccccacctgccccacagcagcagtccatggccatcagtcacctgggtctcggggctgcctgcaagagtgcagaaacaggagttcaggtgccagccccgtaacttggagggcctcgtgcagctttcctgctggagcgtgtgtggattcaggggcaggggatagtcctggaccaaccatgactgtgctgacccttcttctctggaacaggtatggatatggcagggtgacagtcacttagttctaccatctctgtgtcccatgggtgtgtcagtgtctgagaccatggtgggttcagtctggtggctgtattttaaaataagcaaaacgtcatatggtaagaggagcccattggtgatgctgctcaattgcacccaggcccttctttcactctcaaatacttagccatgttctacacaatcgcacaatttggccataaacaggaatgaggttcaaaagaaaagatggtaagtgtcacatgtccagaacctgagcgttcccctgccatgaagggagtctttcattcaccccaggaggagaggctgtcacctgaggaagccagcatgggggagaaaggcacttgctacaaagtggggtgcacagagggtacccccccatcttcagtctcatagggaattgggccccttggccaaaagcttgcagtacctaaaaacagagaaacgtgctttgcaaaaatggctcaaagagcacaacagaatgcgctgtccatgtgcccagtgctctcaggagccctgacctattgcagaagcctgtgttgaagccgctgcactagtagaaggcagctcctgatggaataggggataggggtgggctgtgtgggagccaagagcatctggcagcctgactggagatggtgagttcctgaagcaggagttgtaggcacccaaacatctagtctttctgcttgtagcgaaggttgcaggcatcatctccacgaattcaaatagattcttcttggctaggcatggtggctcacgcctgtaatcccagcactttgcaaggctgaggtgggtggatcacttgaggccaggagtttgagaccagcctggccaacatggtgaaaccccgtctctactaaaaatacaaaaattagctgggcatggtggtgcacgcctgtagtcccagctacttgggaggccgatacaggagaatcgcttgaacctgggtggcgcaggctgcagtgagccaagattgcaccactgcactccaccctgggtgacagagtgagactgtctcaaaaaaaaacaacaaaaaaacagattcttctccagccaaccatgtcccgccactcagaagtggtttcatgcttctactgataagccaacttaacatcagatccaatacagattttttaaagataaaataccatctctactggacctgtttagtggctcaggctgccctcacaggacatccctgagaccaccctgtcactcttgatgttggaaccagggcccaggcctgctcctcattgtctcctgccctcctagtccccaggagaggaaaagaaatactgttttagagaaataacattttcaacaaaacatccctggagtcagattttgagttggggtgggctaatcagggagtcggggctctctgcgtgatgtcagttctatggctaactggtttttctaaaccagccagctgcctatcaaaacagtacaacttttctaggaaatgcaattggcaaagacacttacgatgctgagaagtacacaaggtgaaactgctccagtttttctcatagcagggtcagcaggaaagcaagtggtgcccctggtcccatctcacacaggtgagactgcaccgagaggtaacgtggccctcacagcccaccacgcctggccttcgcccaattctgaaacttcgtaggatagagctggaaagtgccacatggtgaagcgagatccagctgtctgggtggatgtcggagtccataggctgagcagagatggttcttagtgaggttctcgctgccagttgacggtgaaatcatagctgccatttacattttgtgagattatgaaaaacataagactaaagaaactaaatgtgttattcctgtggacacaaaaatgtgtgtttttcagatggggaggggaccaaaaaggaaaaacatttcatcttaaaactttcctaagacaaaggaaaacaaaaaaccatgctctacaacttcaaatttttcttacaaagaaaaatttaatattcgatgagaggttgaaccaggcttaaagcagacatactaggaaatggtgcagcctgtaagaatgccagtttgtaagtactgactttggaaaagatcatcgcctctatcagacacttagggtcctggtctggcaattttggcctgatgtgatgccacaagacccaacagagagagacacagagtccaggataatgttgacagtggtgtagccctttaggagaaatggcgctccctgcggctggtattaggttaccattggcaccgaaggaaccaggaggataagaatatccataatttcagagctgccctggcacagtacctgccctgtcggaggctctcactggcaaatgacagctctgtgcaaggagcactcccaagtataaaaattattacacagttttattctgaagaacattttgcattttaataaaaaaggatttatgtcaggaaagagtcatttacaaaccttgaagtgtttttgcctggatcagagtaagaatgtcttaagaagaggtttgtaaggtcttcataacaaagtggtgtttgttatttacaaaaaaaaaaaaaaaaaaaaaaattaacaggttgtctgtatactattaaaaattttggaccaaaattgctacctatcatctatctttttgattgcagggaatccctgccaaggtaacctgacagtcggcctaattctgttgacagaaaatgaagccttgacggttctaattatccaaaagtgggttttcatcaggacgtacagtcagagtgtgagtgcattctaatgaaaacttcagccctcattcaattgcatataaaagccctcaaagagaacatacagtacagcagttttgtaaaaggcaacaatacgatttgtacagaccccgacactccaatcctatagatcaccacgttgctcctctgtccccagcaccccttatttcttaagcagcaccaccagtccccagaggacaagagcagctatatctcatccacctatgcatttctgcaccagcgatgcaaaaaacaccctgggtgggccacagagaaaaccgtaactatggatacccaaggggcagagcagccagctggacctgctctgtaattcacttacttacttcagagggtggttcaagtcaaacaaacaaaaccaaagacagttgcaacccatggtggatccaaaggtacagtatcaaaatcatggaactcttgcccaaagaaaagactgcaaatagtcatctggtatatcttgtggaaagatgataggtttatagtgactcaaaatattttaraaaaatttctgtagtgtcaagttctttcaaacttaaaattttaaccccagaggattttcgctgaataaatgagaattggctctatttcttctacttctggatagcccgagtaaaaatactaataatttctagattttagtggggaactacaattattaggacccatggatattgctgcagttcaaatacaatacagtaattacaaaatatagaccatctctttacaaatacaaattatagtatattacaagtcatgtacagtaaatctataattttaaacaaactagtgtatctaagtttacctggttgcgagtgcattattattccagtttacagttgcccttagcgtgacagtcagaaaccgaccatcggagtgatattctcttatgtaaactggcgtcacatcacagaaaaccttatttatgaggtcccattgccctcgcaataatcactggtagctgggttctgacttacttacacaccgtatttcagaacagctaaacaggaaccaggacgcagtgtatttgggggaaagggtttaaaaatggatatgttgggcccagtgactgatatgctagacygatggctgaggtaacgacacaggtgtgatgatcgtcatcacctttaactttcccctgcaccccgccgccatgccttcagttgggtgggcctggtgccctggtacatgggagaagcagactccacagcagtgcccatctggacaatggggcagggcaggtctggcctcctcacccatcctctgtgagagggcggggcctgctgtttcctgcagctggggccgagcgcatggtactctgccaggctcaaccgcttgggacctgttcctaccaggtttatggctttcttgaggcatgacatctcttatacaaaagtctaattaattgaatattactcccaactagtgcctaaactttcctaactatgaggcacttttcccctggctctcctgcgccccacctgaggccagagccagtctgcccctcgctgggggctacaaggtggtgatgcatatcatttcatccgccaggtcctcctcatccctcccagggtctggctcttcgtcgctgtagccaggaccaaagtcctgtagctcatagtcctgccggtgtgagagggggcccacatccccrttggctcggggacgcacgttcccattaagcagggtgctggctgcactctccatctcgtcgatggtgaggtcacaggcatcagcgatttcgtgttttgttgctgacacaaattttgggtcccttgcatagcgtcccaagccttcggatatcaggacctgtacagaaaagagggatggatggcatgggggtgttataaggctttgcagggcagggggacgacagaaaaatcaactccagtgctaacttaactgcaccgtgtgctttggggatgcagctcaatcatgttttctagacctcatacataataactagtgtaaatggctttgaaaatgtcctggagctaaaaaactacacatggcccaacaagagtgaaacccac

SEQ ID NO: 94034 - DNA, 14136 bp, Homo sapiens
  misc_feature (1)...(14136): n = A,T,C or G
agtgctaaattaaggccctctgggggaattattcctgttcaatcacagaatgaagaaggcttcagccagtccatagcagagacccgtaccccacttccaggaagccagggtgagcactggccctgccccggctgcagctgcagcctcattctcagacccggtgcagggcatgtgcagtggctgccctggactgcgctgctccacctcccatcaccaggcaactgagactgggaacttggtcctcatgttcctttctgggtgcgtggtgggcaactcagaggcagaatgagaggctgaaggtcccgcagctgagacctgagacagctgcttggggctctcccttcccaggtgccctccgcaccttggccatctgtttcctgggcacatgtatactctaggggagaagagggcagtggagaggattaaattacagtcgtgcaccacatgccatttcagtcagtggtggaccgcatgtgtgacggtgatcccgtgagattataattccttatttttaccataccttttctgtgtctagatgtttgggtaatacacaaatacttaccattgtgttgccgttgtctacagcgttcagtacagtcacacgctgtacaggtttatagcctagaagcaatgggctccaccacacggcctcggtgtgtagaggcttgacctccaggctcgtgtgagtgccctctgtgatgttcacactaggacaaatcgcctaatgacgcatttctcagaacctatccgcagtgttaagctgtgcgtgactgtatttaagagaacagactgttttaaagcaccgtgatttgcatactagttcttaatatgctaattacacatcattctttgggttctcagaagcagcacttcaggacacttttgcagtgggccgctctgcttgcgttagaggtactccaggggtcttcctcagcccaaatgcaggctgctgaaagctggccttctcccactcctccaatgagcatgtggcaggccctcactcgggctgcagggctgggtggctcagagggctgtcctgggtcccaggaaggagcagagcatccttgggcctgggagcccagacagggccgggttatagagggacacctatagatccaggcacggctttgcctgtacaagtgtaaaagaaacaatctgtttctctctgtcaagaatcttcttctgaactgagcaccagagcataaacaagggggagtcaggggagacaagcagaagaagcagatgcacacgtgcaggcagccaggcgtggtgtgggagggcttggagttgagaaatacgcagggtgtggcgtcaggcctagagagtggtcctgccccgtgacaggacagcagaacggggcgggcctgggttcagggcttgggccactgtccagtgggccgtccctgaggggggtgacccagcacctggagccaggaagtggaggatggggcaaggtcatcaagtttgctgtgttgacagcacgccacgagcatgacacctggcggagctgtgctgaggggttgggtcccaggtctgtggtcagaatgcggggtcatagtaccaggcagggtgtggggttgggaggaggaggtgggcaagccagcaccagggctgggagcagggaactggcgcacaccgcatcatcactttcccgcccagaactctaaggggcccgggaagtctacattttaactcggccttcttggtcgctacaaaggtaaatttgccaggaggattaaacaagcttcatgtccggctgtgagcttgattggtaacttctgaagattcagacgtcgatctaatgtggcaggtgggtccacacctgtgctcttgccctgcaccctataaatggtgtgtctgggcccagttggtctctgtttctcccccagcctttaccaacaggtcccccagcacaggcacctcatcccctgcccaggacgtggttcagggacctgacattgcctccctgtgaagtaagtagacaacagaaaggcattcatttccaagttgccttcaaaaaccctgttcttaccttggaagcagtgctgttggcccagggaggcctgtactgcaccttggtggattgcaagaggctaagcaaccaagtcaggaagtgcagagactgtaggagattcaccaaggcagaaagacccaagctacccaccccatctgatatggtttggctctgtgtccccacccaaatctcattttgtagctccggtaattcccatgtgttgtgggaggggcctggtgggagatggttgacttatggggtaaggtctttcccgtgctgttctcatcatagtgagtgggtctcacaagatctaatggttttaaaaatgggggtttctctgtacaagtgctctctttttgcctgtcgccatccacgtaagaagtgacttgctcctccttgccttacacttctgagacaggctggggtgatcagatgtcacctgagggctggtggaaggcgaggagccctgtcagatacggagggtgatcagacgtggagtctggataaaccgacttcgtaggattctcacaaaaggacagtgcagaaatgaatgaggaaatgtacaagttaaggcctcattgagaaagagctcagggagtctgagagtttggtcaaggagagaaccttcgctactttgccaagttgctggatgccctttggatgatgttctgagcgtgcggtcactttctgtccgcctgagacaggccaccctgggagggaggggccaagcagagcgcatcttggccccagttcccactccccagggtgggccctctccaagctgtctgtctgctttccttcagcaatggggggaaagcccccattgctttccttccctgttctttgctgtctgaatctggtattccaaggatggagagcgaagggtccacgtccaccctccttcccctactcacagagccacacagacctggcctcgctgcagcccccaagccactggagtaggtcatatacactacgctccacacccacatacactcacacactcacaacacacagcacactgtgcacaaacgcacacatgcatgtgcatgcttcatgctgagatgagcacggggggtcagacatgacgggcgtgtgctggtgcaggggcctgggcttggagagacagggctgggagttgagtccatccagcccccagggacggcttcatggacagctgggtgggcactggtctgggagtctgtcttggagacagtgatggtgctggctgccggcaggctgcgctgccctgggccctccccacatctggcctccagggctaccttgcctccacacctggcaggactgactgggggagggcaggagcgggtgccagccctcctgggagcactgggtggcagctggatctagagtttgtgtccccccaggggagcccggcccccgtgtctgcagttcgtgtttcccagaggaggctgcctttcagaatgctccttggctttgtttagaacagcgctcatctgtctcagcctcgtctgaaaaatcgccaggctcgttcctctgcagaggaaccgctgtagccctagatcaagaagccgagtctgtcctctccatatctttccgggcctttgaattcccagcagtcctggcatttcagcaccgcccacgtggcacagcccaggacaccagccttgacctttcagcctggccaaggtgcctcctcctctgcctctcaccttcctcatggcaatagtactcatctcagagggcagaggcaaggattccaggggaccatgtatgtaaagagcctagtgcagtgccaggaagatgataaacactcagtgagcggcaggtattcctccccgccccttccggctttgccttccctttcccaggggactgagttcagaagcacccctgctaggttcagactccagctctgccattccctatgcagcctgggcaagttgctaacttctctgaccctcggtttcctcatctgtgaaatggggacagtcatagcttctaactcagagggctgtgggtggagctgaagcagcacccggcccactcaccagttgccatcaacacctctaccactgcrcatgctgaggcggaccagaaagagaacagaggcacctctcactcatgcagtgtcttgggttcagtgccagggaggccagggctgcccctgcccttccacagtctccacctggctccacaggtgcttggctagggtccgctggaggatggggaggcaacacaggctttggcgtcagaaacccgcctcagcctcaccacctgggacttggagcgattcccataacttacttggctgatttgtagcataacccggtttcgctacctgtccagccttttctctgccactacctccacacactgaagctaggaaagcttcctcagcctgccccaaccgccttcaccttctgacacaaggttttcttgcccctgccttcgtggcacaggtcctcctgccctggggcaacccctccttcagggagcctggctcagtaaacattttatcagctgaacccacgaggtgcttccctcgtaccccgtttgcctccctgtgtctgcatccccatcccctgcccccggcctccccacagcaggcagaagggcaccaggcctcatttctgcattggcctcaccttctagccaggggtattcctggtctaactagtatgagagctaggatgttgacagagtcaatatgtgagccaagttcagctttagtttctttcctttgcaagatagacaggataaagccttcatcaccaagtaagaaatgtaaagcacgcgacgtgggcatgctcagtgtgagtcccattccacacagggcggtctcctccacaggcacatgtccccaccccacataagcctggcatttgctccagccccagccagcaagtccagcgatgggcacctccagccatcccggccctgaggggtgacactggcttcccaggcccgagcgcttggcctccccgctgtcacgggattcccttccaagtggaagaagacaaagattaatttgtttttaattcatcttctaattgctttcttctctaaagaaggcctccacgaggcccaggcccaatccctggggccatggttgtttaaaataaaaaatgaggccactcggcagggacacatttttaatcactggaaaaatcctcctggcatcagggcatgcagcctcctggcatgtgactccctggaggaagcccagcagaaagcgtccttgccgtgggttcagggattcccccttggacagggaggcgagcccgccagcagtgccgactgcttgcctactaagcgtgagaactgtgggcagtgcaggtgatgtagaaggtcctctctgcactcagcccaccaggccccaagagaccaggcctcaagaatgagacaggcctggccagtggcgtcagaagtgaatgatgcctgggctggggggactccctctagatggcactgacaggcactgccagagcagccactgggcccactgcacagcccacttccagggcccctgcgacatgccatcctaatacccacgccccctggctcctccggcgacacgctgtccccatacccaaaccctggctcctcctgtgatctgctgtcctcatccccaaaccctggctcctcctgcgacctgctgtcctcatccccaaaccctggctcctcctgcgacctgctgtcctcatccccaaaccctggctcctcctgcgacctgctgtcctcatcccccaacgctggctcctcctgcgacctgctgtcctcatccccaatccctggctcctcctgcgacctgctgtcctcatccccaaaccctggctcctcctgcaacctgctgtccttataccccatccctggctcctcctgcgacatgctgtcctcatccccaaccctggctcctcctgcaccctgctgtcctcatccctaaaccctggctcctcctgcgacctgctgtcctcatcctcaaaccctggctcctcctgcgacatgctgtcctcatccccaaaccctggctcctcctgtgacctgctgtcctcatccccaaaccctggctcctcctgcgacctgctgtcctcatccccaaaccctggctcctcctgcgacatgctgtcctcatccccaaaccctggcttctcctgcgacctgctgtccttataccccaaccctggctcctcctgcgacctgctgtcctcatccccaaaccctggctcctcctgcgacctgctgtcctcatccccaatccctggctcctcctgcgacmtgctgtcctcatccccaatccctggctcctcctgcgacatgctgtcctcatccccaaaccctggctcctcctgcgacctgctgtccttataccccaaccctggctcctcctgcgacctgctgtcctcatccccaaagcctggctcctcctgcgacacactgtcctcatccccaatccctggctcctcctgcgacctgctgtcctcatccccaaaccctggcttctcctgcgacacgctgtccttataccccatcccgggctcctcctgcgacctgctgtcctcatccccaaaccctggctcctcctgcgacctgctgtcctcatccccaaaccctggctcctcctgtgacctgctgtcctcatccccaaaccctggctccttctgcgacctgctgtcctcatccccaaaccctggctcctcctgtgatctgctgtccttataccccaaccctggctcctcctgcgacctgctgtccctatacccccaccctggctcctcctgcgacatgctgtcctcatccccaatccctggctcctcctgccacctgctgtcctcatccccaaaccctggctcctactgcgacctgctgtcctcatccccaaaccctggctcctcctgtgacctgctgtcctcatccctaatccctggctcctcctgcgacctgctgtcctcatccccaaaccctggctcctcctgtgacctgctgtcctcatccctaatccctggctcctcctgtgacctgctgtcctcatccccaaaccctggctcctcctgcgacctgctgtcctcatccctaatccctggctcctcctgtgacctgctgtcctcatccccaaaccctggctcctcctgcgacctgcggtcctcatccccaaaccctggctcctcctgcgacctgcggtcctcatccccaaaccctggctcctcctgcgacacactgtcctcatccccaaaccctggctcttcctgcgacctgctgtcctcatccccaaaccctggctcctcctgcgacctgctgtccttataccccaaccctggctcctcctgcgacctgctgtcctcatccccaaaccctggctccccctgcgacctgctgtcctcatccccaaaccctggctcctcctgcgacatgctgtcatcatccccaaaccctagctcctcctgcgacctgctgtccttataccccaaccctggctcctcctgcgacctgctgtccttataccccaaccctggctcctcctgcgacctgctgtccttataccccatccctggctcctcctgcgacctgctgtcctcatccccaaaccctggctcctcctgcgacctgctgtccttataccccaaccctggctcctcctgggacctgctgtcctcatcccgaaaccctggctcctcctgcgacatgctgttctcatccccaaaccctggctcttcctgcgacctgctgtcctcatccccaaccctggctcctcctgcgacctgctgtccttataccccaaatcctggctcttcctgcgacctgctgtcctcatccccaatccctggctcctcctgcgacacgctgtcctcatccccaaaccctggctggcttctccacaggtctgtcctgcatgctcctaggttcactgattcactcagcacaagttatccgaggacctggagggtgccaggtgccacaccagcactgagccagcagtgggagctggggcagacgaggctcggagctcatggctcccccaattacaacgacctctcaggtgacctcaaggctggccgagggccatctcatcacccctgtcctgttggccccaggcagccaagaccgatggctttggcccrtccttcccagggcccctggcagtgacagctccgtgtgccgcacagctcctggggtttccctggtagccacaccctgtgttcctagtacgttttgcccgtttgacagatgaggaagtggaagctcagaaagtcactcagtaagtggtggggccaaggctaagtctctgatgagttgaatgtggttttgcaccagcaggagacctgttttcagccaggggaggaagatgtgctgttcagcttgtgacacggggtgggggcgtctctggaaaacagaggctggcacgcagcaccttcaggtcagcacggtgggaaggagaggaggaagcagatggacagagaaagaagctgggcaggcccagtgaggatttcagccgacccatgggagttgggatggcttcttgttgttaccccgagtttgggtgaggtgaggggcccagccttgataccctgtgtggatcagtcaccgcatgtaggtcaccccaggaagggtctgtgatctcggtcacggcagcacccctgaatggaggcagtcttggaaggcagcacccagctgtctgcaagcagcacccagagtgcctgtggactgtggctctggccttgattgctgaggggcaccttttcagaccagctgcactcctgggagcagatgtgggagccccaggtgatacaaactgactagttcttggtgatgtctgctgttaattgtgcagctgagaccaggcagtcaaaggggaaagagctttgggggtcactcattagatgcccttatttcccagggaaggaaagcagggtctggagagggccaggctccttgggaggtcaggagcagagcatggagcagcagcaggctgggggggccttggctgtttcaatctaatggtggctgccacatggcttcacctttccctgcagagccagcctgagctaagaacacactggatggtctctctttttgcacttgtccgttcaagattgagacgtgccaagatgaagtcagtttgattcagcaaatatttatggaatacctgctctgtgccaaggagcaggattgggatgcacaaacaaccatgatgggggtgcttcagctgaggagacagacatgcagacacctcgctgtcccatggccacaacacaggcgaggagaggggggtggcattgcccagcagcatcatgtgttgaggtggcagcgctactcatagaagtcctttcatcctcgcggtcacccttagtccatgttacaaatgaggattcygggacttgtagaatgggtggctggccagagggccacagctagtaatggcagacataaggcttaatgggactcatctgactcaggcaaacaaggagagtatgatcaaggcctcaggggagcatagagaaatctggaaggagtacagaaggcttgcagcaatgacttactgcatccagaccttgaaggatagatgagcattcagcagccactgggagtatttcccctgagggaagagcagaacaaatcagtaaaacggtaaaacgcatgaacggctattgggaaatctgatgggaagtgaataaagggagggaggaaggaaagggggatagatggaaagatgagggatggatagatgggtggatggatggatgggtagttgttgatggatgaatggatggatggatggtagatgggtggatgggtggatggtggatggatggatggacggtagatgggtggatggatgggtagatgttggatggatggatggtagatgggtgaatggatggatgggtagatgttggatggatggatggtagatgggtgaatggatgcatgggtagatgttggatggatggatggatggtggatgggtggatggtggatggtggatgatggatggatggtagatgggtgaatggatgggtagatgttggatggatggatggatggatagatgggtgggtgggtggatggatgggtagatagatgttggatggatggatggtagatgggtggatggatgggtagaagttggatggatggatggatgggtagattttggattgatggatggatggtagatgggtggatgcatgggtagatgctggatggatggatgctagatgggtggatggatggatggttggatgggtagatgttggatgggtggatggatggatggatggtagatgggtagatggtggatggatggtggatagatggtagtggatggatggtatatagatagatggatggatggatatatagatggatggatggtagatgaacaggtggtagtggatggatgtatgaatggatgaatggtagatggatggatggtagagagatggatgagtgaatggaggaatggtggattttggatggatggatagatggatggtagatggacagtagatggatgtgtgaatggtggatgggtggatgctggattgatggtgggtacatggtggatagatggatggtggatggatggatggatgggtagatgttggatggatggtagatgggtggatacatgggtagatgttggatagatggatggtagatgggtggatggatggatgggtagatgttagatggatggatggatggacggtagatgggtggatggttcaattgtggatggtggatggatggtagatgggtggatggatttttagataatggatgaatgtataaggtggtagatgggtggatggatggggggttttaaaattccccccggaggcgggggatatcagtaccgaacgggcnnnnnnnnnnnnnnnnnnnnnnnnnnnnnnnnnnnnnnnnnnnnnnnnnnnnnnnnnnnnnnnnnnnnnnnnnnnnnnnnnnnnnnnnnnnnnnnnnnnnnnnnnnnnnnnnnnnnnnnnnnnnnnnnnnnnnnnnnnnnnnnnnnnnnnnnnnnnnnnnnnnnnnnnnnnnnnnnnnnnnnnnnnnnnnnnnnnnnnnnnnnnnnnnnnnnnnnnnnnnnnnnnnnnnnnnnnnnnnnnnnnnnnnnnnnnnnnnnnnnnnnnnnnnnnnnnnnnnnnnnnnnnnnnnnnnnnnnnnnnnnnnnnnnnnnnnnnnnnnnnnnnnnnnnnnnnnnnnnnnnnnnnnnnnnnnnnnnnnnnnnnnnnnnnnnnnnnnnnnnnnnnnnnnnnnnnnnnnnnnnnnnnnnnnnnnnnnnnnnnnnnnnnnnnnnnnnnnnnnnnnnnnnnnnnnnnnnnnnnnnnnnnnnnnnnnnnnnnnnnnnnnnnnnnnnnnnngatggatggcggatagatggtagtggatggatggtatatagatggatcgatatatagatggatggatggtagatgaacaggtggtagtggatggatgtagagtggatgaatggtggatggatggatggatggtagagagatggatgggtgaatggatgagtggtggattttggatggatggatagatggatggtagacggacaaagatggatgtgtgaatggtggatgggtggatgctggatggatggtgggtagatggtggatagatggatggtggatggatggtggattgatggatggatggatggatgggtagatggtgagtggatggatgaatagtggatagataggtggatgataaatgaatggtggatgggagacccagccaataaaatcaaaggggcagcagcctgagggcatctcttgtctgctggaggatggatggatggatggatggatgctggatggatggatggtagatgggtagatgctggatggataggtggatgacatgtagtctagagtttttgagtttgtggaggcagaagaggttgtgtccaggtctttgttctagggttggggcatgggagtccagatacctaggcagatagagctatatccgtcaccctaactaagaacctcaccaagctgaggtcaatgactttagaagtgaaacaggggagtcccaccctgttgctagtggccacaagctagtattggaagcaagagggcagtgggaagaatcagaaatgagcaaggctagggcatggccctgggaccagcagcagggatatgcaggggtgatctggtgtctgaaagggccaggcttacttatatgccatggcgggggtcaatcccaggtgctgtgggcctggcccctgggcatccccagcctctggacccctgaaaagatgcattctgtctagttctggctgctgatcattgcacagccaagaaatccactgtgatttccagactaacacctgacagagttgggccagaggtttcagacctgtggctgggtgggctgactatgttgacctcccataacctttctcccaggcagggctgtgctaattttaaatggcgtattgattggccagccagccattccctaggatgaccccatagccctgctggcttgccctggcacagcccatgaggaagtctcctccccttgtgcttggctgtctgcagcccttggggtgggccagagactccatcacactgcctggcagagggtggaggctcttggctctagtgctggagtcacacttggtttccctgtgctcagcagggtgaagacccacctgctgatgtcacctgctgctgctccaggaaacaaatggactcctggagatggaagcagttgagagtgttagtgagctctgcaggtagaatcccagcataggctgggacctgttgaacaggtgcagtttgaatggtcccacgggactcatcccaggcaggcccagggtgttcctgccccctccgtgctggaaagctcatttagagaagccgcatggtctttggagagaggccagaggtctatccccaggagcaggggccacaagccagctttgggggtcccagcaagtcctctcttctctagttcaggctgcctggagagcccctcagcctgtgcccagcacagctccatgggtcttttcatgctggggtgcaatgcaggggtgctgcctggccctaaggtgctcctctgcacactgaggagacccagcaataaatacaaaggggcggcagcctgagggcgcctcttgtctgctggaggtggctagggtggaagaggacaaaaaggcacggtagacctgagcctgctgaggcctggggaggcgtggtttgcctccagggtctggtaaaccagtattcattctcagggtggctgccataatggagagcaggaatcctgtgcacatctgggaccccggattaaattaatacttgcagcttttggggtgctcaagccccatcagagaagcctggggagcaggggaggttgggcaacccctggtggatgcttcaggactgaggtgaggtctatgccacactgggacagccagggctcctgtggaccctcctgtatccagcccccaccactcccagctgagatgggatggggtgggggacactcctcacccggtcttggattgtgtgggccacagtctcccctgcaggctgtgagctcctggtcgtctctgtgttgccagcccaagcctaggacagagggagtgtctgggcccatctcccttgaccaggtcctcaggaacctccaggctgcctgtggccccgcttctaaaagctccttgcccagagtctcagcagggaggtgctctccactgggcagccctgcccctccagtccagcacaggggcagcagctaaccgccacccgctcatccagctgcccggctctggcggttcaagcagatgggccactagaaggtccttttgcacctcatgtccttcccgtttgtgctctaagactttatagttctatgtgaagctttggctgtcaccacatcaagagtctgtttaacctcgtaagcactgacccagcaccaggcaggggtcagccctgggctgtgtgaggacagtctgggggtacagggtgagaggggttcccggcatgcttcatgacaagcatggcaccttttcatggtaggaagaagttctggacatggcgcccagagatgagaacatgaaatagtgagcctgtttgaaaccattcagcccattgctctcatgtgacaatggggacgct

SEQ ID NO: 94035 - DNA, 35458 bp, Homo sapiens
  misc_feature (1)...(35458): n = A,T,C or G
tccttataaaaggaaacttggacatcgacaattgcagagggaagacaaagcaaaaacagaggagatgcctatctatgagccatggtgagagggttggaatagatctttcccttacactctgcagaaggaaccaatcctgatcttagacttctaaatttcaggattgtaagataatacatttctgctgcttaagccgcccattttgtggtacttggaaatcaggctaaaatcacacaatccattatttttcttgattttagcactgaactaagttcttatacaaggtctaattcatccaggctcataaattctgattttgtcagatttgttcccttagaaaaataagaatgaggacaggtaattcattagctaaaacatggagctcatgactatctatatactcgactggcagcctagcctggaaaacaggagatattgacggctctggtatcaagtagttatgtgacttttgagaaagtcccttcctccctctgtgtctaaatttcttcatcctcaatatgaaagactgggattatatgagctttaatgtttcttttgtagctatgactttatgtattaacaatgaaaatatttactaaataccttaaaaaataaatgtcaaatgctttgagttttccattaataacattactagaaaataagacttctagtctttccacaattcagttgttttaaaaccatctcttagtcttctctttctggatgaaaatccctacaatgcaactatttcacaaggttaataatttcaaaaaaagtttgaaaataacctattgttcccaatccaacagatcacaaaatcctactacagtattctgattctatttcagacacattttctaaatcttgccaattatctacaacttctttatcactgtcaccacttagactctaaaaattaatgctcttgaactggttcaataggtccctaactcttcactttctggtcacacacctgtttaacctatcttatatatgcaaagtgattttctaaaacataaatctcatatcactcatgtttttagaatccttcaacatcttgccatcatttcttaatgtggtttccctgttccacttacattagaatcacttgggacaattaaaaatgtagcctttaaagacactccttgaaaatacccctaaatgggcagggcgcggtggctcatgcctgtaatcccagcactttgggaggccgaggtgggcggatcacgaggtcaggaaatcgagaccatcctagctaacatggtgaaaccccgtctctactaaaaatacaaaaaaaaaaaaaaaaaaaaaaaaaaaaattagccgggcgtggtggcgggcgcctgcagtcccagctactcaagaggctgaggcaggagaatggcgtgaacccaggaggcggagcttgccgtgagccgagatcgagccactgcactcgagcctgggcgacagagcaagactccgtctcaaaagaaaagaaaagaaaagaaaagaaaagaaaatacccccaaatgtcttatcttgcatgatgctgcatccccagtacataaactctgactgggactcagaacgcaataaatatttgctgaattaaggaattcttgaactgcactctaaacctaaagaatcagaatctggaataaaggatcctatgttttattaagctccctaagtgatttttttatccatagtaaactctagcaagcaccaatacaaaggataatgtccaaattatgtagaatggcttcataaggcccttcacaatctgtactctagctacttttccaagttaatcttttgccacttctcatttgcatagccatagtgaaatacagtttcattcataaaaagcaatgttgctgaacctcttgaattgctctttttccttctgtgtcctttctcctttgctagctctacaacttaagcagaaattcttccttatggagctttgcctgacatcttcacactttcttctcatcaatgctcccacaacaccctgctctatttttgtactatactatcatactacttttatttccatttctgtaccatgagttcaaagtcaggatctgtcttattcctttgtatttccagagtaaagtacagtgagatcagtcacttactctcattcaaatgtttgttcaatgacagaatgaatgaatgaatgaataaaaaatgtgaagccagagattacaggatttaaggtataaatccaagtcaatgttctgaggttttcagaaaccagtaagtcaataaatatcaatctggttgctctctgttctccaaaactttttccagtgcaatggttctcaaagtgtggcatgggcacccctggggtctttaagaccatttcagggagtctataaaatcaaaactgttttcgtaataatactaaaatgttatttgcctttttcattctcattctctcatgcgtatacagtggagtaattgagaggttacatgatgtgtgataccacaactgacagaatatagaaagagatgagaatccagctttcttcaattaagccaaacattaaaaagatttgcaaaatgtaaaacaatgacactcattaattttttgaaaatgttatgtatgttaatatgtaataggtttattattttaaaatgaattaatattttaaaaaatttcattttaattttgaatatcataactattaatagatataaaatttagaaagcttttgagggtccttaatttttcagagtgtaaaggagaccttagatcaaaaagtttgggagtcaattctctagtcttttcacaaactggtcaaattatgccaggctcagtggctcatgcctgtaattccagcactttaggaggctgaggcaggaygattgcttgaggccaggagttcaagaccagtctgagcaatgtagtgagacccctgtctctacaaaataattaaaaattagccaagcatgatggtgcacacctgtggtcctagctacttgggaggctgaggtgagaggatcgcatgagtgaggaaagtgtgaagatgtcaggcaaatcttcataaggaagcctttctacttgccttacattgtaaagctagcaaaggagaaaacaaggctgcagtgagctacgatcacaccattgtattctagcgtgggtaacagagcaagatcctgtctgaaaaacaaaaaaacaaaaaaacacaaaacccgaacacacccaaaccccccaaactggtcaaattatacaaacgcgtaaaccaattagttacccacccaaaatctgaggaaacagaaattgttacttaagaaggcctgctactcaaggttttacttacttacttcccccactattgaatgcccaaacttctctgcgcatgcctgttgatatactacccagctttcaagcctgtcaaaatgtgtctcttcttccatgaaattcttcctgatttttcacaactgcatatgctacttgccagtgtgatctgtacagcattttttcacctctcttgtttttctgtatcttaattacatgtatacttgcttttccttcctatcagactataaaggccatgaaagcacagtgatataatatggaaatagaatgtgctttgtggtccaacacacctgggtttgaattccagttccccttcactaattctgagacctgaggcaagtttcttaaattcttagggttcttgctgccacatttttgaatggggataataataattgtcttcttgtcattctgcttaaataggaagagcttagcacaatgcccagcgtaaagtgggcacccaataaatagtagctgttactattaaaaatatataaatcttgtatttccatttatattaccttcagcattacaggcacttgataggtatttcttaagttagactaattaaaatctaacacactgtagaactttctccctgaagcagaaagaacatgagactcaaacaaatgccaaccacggtcatctactcttcctttcttttcagactgactccttttttgatataaaacactaggattattttctctttctggccgtctgaacttttctattttttgcattcctcttattctgtaactataaagctcttgttagttttttaaaaaaattataagtttaagtatactcttttgcttcccctgtgattatttctaatctactacaaagttgttccataagctgaaggagtattccttctgagatcgctaaagagataattttccttccttcagtaaacgcaaaaatactttatttgtatttcttcaatcacacatatatttttagcttttataaataaaatggactctgtagtcttaggataatttaaatatacattagatactagcgactgaagatatcagaaaataccttttatatataaaggatttctcgaaggtgttcaaaatttacatatgcttattattgatgtgtgatagacctcagagacatgcaaaacaccatccttggctcagcaacaagaactctgtttcaaactttcaagcatcaccaaaatctgaactattgatgctaaaggtattaattgcaaattgtttggggagaacagaatacaatctaatacgtactgttaatttcaaattgtttggggagaacagaatacaatctaatactaagagaaaagccaaccaaattctttgggaaactctgttcttgattttaagtacttttgtaaacatagcatgtaataagtgatgagactatttctcaaaaactcaagttctaacaaatttcctcttttatagttcctagatgtccttttcatataattcacaaaacttttattccctccttcaaatccctgaatattatcacatgagcattgtatgagggaaaagcgtctcaagatttttatcttatctgtttctaaatctcctctgggcctgtgcaactcagttatgtcagctagattacaatgatcccaaccttgaagatcctgaggaagattgcacaacatccctcaagcatttttcttactgccatagtttgtattctaaaatggcagaaacagagctaaaatattgatttgtttttctttatctaatccatatctttcagtcctttaggacaactgcgctgttttcaaaaattcaaatcgactttaaccaccacccgaagtgcagcctataggtaacttccctagattattattaaactcctgagaagggtgagagccaaagtatcaagagtgccaaggagaaatgcagaatctcacaggaaagcagaattttttttaaaaagttcctgtaagagaatggtgccttgaaacagaaacttaaactgtgatgagttctccaaaggtccgtgagaaaaaaggataggtgagaaacagagttaagagtcggtgacagggcaaagggcacagaggcatttctcaactgcagagatgggagaaccctggaggttggccacctcccttttcatcccatggttgatcgaactccctctacatatcccagactaggatcgcccggcctgtccttattttagaaraagtcacctctcccacccccttctcccaatgccccctttcaagcacgttgtcacccacctccaaggaccgtgcccaggaagatgcatttctttttgtggcgtttcagaaaattccatacagacctcagcatctttaggccctaggggtgtgggctgactaggggtgagggactgcttcaccaggaaactgtttcttcgtcacctggcccagatgacccagcaagagcgccgtcgtcccgttctgtgctctcccgaaatcacaaacgtgactttccgcagagactgtcaccggagcggcaagggggcgtggactacagcaaagcagctacgctttctgccgctgccgccgcgcagccgccgccgctcactggtccgacaagcccaggtccgttcagaaatagctcccgagtgccttttcattagactacccccggaaacggggtcccgggcccgccgcgttccgctgcccgcgctcctcctctgccgcgggctctgtagctgagtggtggctgggtatggaggcgaaggcggcacccaagccagctgcaagcggcgcgtgctcggtgtcggcagaggagaccgaaaagtggatggaggaggcgatgcacatggtgaggagcccgggaggtagatgctgcggggtgggacctttctccagccctcaacccgaccccggcatttgagcaaacgttctttctcgtcaccataatttttatggcagtcagatgttctgggtgaacaactggctttactgcctcgaaactttctgtagcccattctcacagtggctctgggcgaaggaaggggaggaaatacacaaattatttgtttcattgcggtggagtatgctgcagacttaacattctgtcgccggctggcacgtgctgcctccctttcctttctgtggtcacacactctccaatctacaaagtcacattatttgaggttttggcccttggaacatgtccagcagaaggaaggaaactgagaacgtttctggtagagagcagtatggaaacaagtccctgtacaatcggcgtctcgcattcattcattatttcctctgcccttttacttccttccctcactcccttcaggactgcgaaataaagggggctttcaacagaatgctgtgtgctagcgagcttcttaactgggaaaaaaagtttgtttgtaaatatatgtatttacattttaataactacatacagccacgtgccacacaatgacctgtcggtaaaggtcgttatcctggagcattaaatctactcaccttagccstattgtcccatccaagtactaaccaggcctgaccctgcttagcttccgagatcgggggacattcagggtggtatggaggtagacaaccctagtttctatgtagacttctgggctaaacactttcgctaccttttaggttgaccctgggctagcacatgtaaatacatttacatacgtttacaaacaaacttttatcccagttaagaagctcgctagcacttttcagctccattataatcttataggaccacatatacagcggtggtgctataggattataatgaagctgaaaagttcctgttgcccagtgacatgtagccctcctaacaagtactttttttcctttaagaccttgaagaaacttgtatatgctaaaacccaagaagcagctgcctccttaatcctgtgtaggaggacgtaaactatggaatcacatccctaggtgtttataatacaattaagagacaaaaaatgtcaaagccagagaggtctagaaattctttgaaaacatctacatgtttaaaaagatacaaagtagcatggccagatgcagtggctcatgcctgtaatcccaaaactttggaaggcagaagcaagaggatctcttgatctcaaaagttgaagaacagcctgggcaacttagccagaccccgtcactactaaataaaaatttaaaaattagtagggcatggtggcatgtgcctgtagtcccaactactcaggaggctgaggaaggtggattgcttgagccttgggagattgaggtcgcagtgagccgtgtctgtgccactgtactccaacctgggagacagagccagaccctgtctcaaaaaagaaaaagatacaaagtaaaggaaatacaaagaaggaaaatatttgcgacatatataaaaggacaggtttaataaccgtagcatataatttatataaaatctaagtactttccgacgtaaaaggaaagatgtataccctaatactgaaaaaggtcaaaggctatgaatatatttctttttaaaatttctttttatttttagaagatttttttttggtttagacagggtctctctgtgttgcccgagctggtcttgaactcctgggcccgggcagttgtcccacctcagcctcccaaagtgctgggattacaggtgtgagttaccacacctcacctgaacatgatatttctaaaagaagtgacgagtgagtagccagcaaataaatgaatacacaatttcactattaatgaaattcaaattaaaatgatacacaattttttacctgttaaattggcaaaagtgaaagcaattttaatgcttggtgataataagggtgtgcatgtttgaggtgtttgttggttgggaggagctgaatttagaaaaccctttttttttgtatgtaacatgtatattacagtttttatttaatatgctgataaagttaactctagttaagccaaagttgaaagttttaagtttaatttactttttttaaattattatactttaagttctagggtacatgtgcacaatgtgcaggtttgttacatatgtatacatgtgccatgttggtgtgctgcacccattaactcgtcatttacattaggtatatctcctaatgctatccctcccctctccccccaaccccatgacaggccccggtgtgtgatgttccccaccctgtgtccaagtgttctcattgttcaattcccatctatgagtgagaacatgcggtgtttggttttctgtccttgtgatagtttgctcagaatgatggttaacagcttcatccatgtccctacaaatgaaaaggatgaactcatccttttttatggctgcatagtattccatggtgtatatgagccacatttgcttaatccagtctataattgatggacatttgggttgagttccaagtctttgctattgtgaatagtgcctcaataaacattcttgtgcatgtgtctttatagcagcatgatttataatcctttgggtatatgctcagtaatgggatggctgggtcaaatggcatttctagttttagatccttgaggaatcgccacactgtcttccacaatggttgaactagtttacagtcccaccaacagtgtaaaagcgtagaacacccttttattaggacaatttggctaggcagatataaaaggccttaaaagtgagcttatcctttgatccagtaatgccctttttttttttcccaaagtgaaaatattttaatgttttctttttctggttatgtaaataattcatggtcataaaaaattcaaactataaaaaagggttaacaaattatgtaaaaattacctaaaagtcctactattagagataatactattagtattttgggagcatccttccatatctctctgtccatatgtaaacagccatatgtacttttgcataaatggaattatatgttctctttttgattatcagcagttttttttggtagtcttaatatattagtcactcctccctacctcatggtatttctgttgctatggagtgactacctaaaatgggacaaaggatgtatgtgctttgaaattatatagatattcctgtattgccttctaaaaccataatgcctaatatcgtagccactaaccacatgtgtctatttaagtttaaattaattaaggtgaaataaaataaaatctagctcctcagttgtattagccacatttcaagtagtcagcacccacatataaccactggctaccgtattggacagtacagatcaaaggacatttccatcactacaaaaggatctgttggatagcatataaggttatcaactttactgctttttaataaaaccattatttttcatggcaggtttctttctgagagctaagcatagcatcatcataggttatcattttaatcatcataacatgttcagcataacattctaaagataggcttggaaaaaagaagtatgactaagtaatagtgttgcactcttggtgtgttccagatactatgctatgcacagtgttttcatgtgggccatgttataagccccacagaagccctatcaggtgagtattattatggtcctcattttcagatgggatattgaagctgagaaagttcagtaacttccccaaagttagagagctgggaaggatggggctgtgatttgaggcctgtcatctgctgttaaatactggcctggcctgcctctcggtgttaggtagctcactgcttgccaacatatcctctgctctctttcttccttttcagtttctttacctgaatactgtgtatctactgtgtaatttaattgaacatttagatttttttcttctgtgaattgccgaggcatatactttccccaattttgtaatagtttgatttaaaaaatcgcactgtaggagctctttgtattttacagctgtttctaggaataaatcacaaagaagcaatataaatatttatatagagaagttctttacttgtttataatagtgaagaatttgaatcacttaaatgtcaaataataggagactagttggttgaatcagatatgttcataaggagaaatactgtacaacctttacaaaatcatgtgatgaaaaaatattacccaatatagggaaaggttaacaatacatttctaaatgaaaagggcagactgctgaactgtatatacagtgtaaatctatttgactttttaaaaactgtaaatatgtgtatgcagggcataggaaaaaacagaaaaaacccccgttgcttcagaataacagggattatattttggggtattgggattcttagtgggttttttttttttgatacatgaggttttttttttttaatcgctaagttctccaccttgaacacatcttactttataattaggaaaaaagaaagattgactaactatctatacatatgtgtatagaaaaaatgttgcaagttttctagaaaaaagtcaattgtatttttttatagtgtgcatttttggggcaattgatattaatataacattatgctaggctctgagggaaattcgaaaagaaagcaaacaccacagacaccatttcaacaaatgtggtatgattaagtttttgctatgtgttagaccttgtgctgggtgcataggctgcagaggtgagcaagagaagcttcgtagtgcctggatctagtgcttgccttccaggaacatactgtttaattgatgaaattaagtcaggcacagatgaaaaggttggtaagtaacatgtccaaagaccacaagagacagatataaagtgctgtcagataacagctggcaaggtccttcaacacgtccgttgagataaatgatagaattccttctaaattttaagggaccaaaaggatgtgggctggtggaaaggaaaggttgatccaagcaaagatactgtcatgtccaaagaaatcaagaactttgttttgggttagaaggagatctatctatctatctagaacagggctccctgacctcaggctcaggtttagggggatctatgaacgctgaaactatatataaaatattatgtgcgtgtgcctttttcaagtgagacagtccataactttcatcagtgtctaaaaggggatttctgctctgaaaaggttaataacctaaatgaataatgaaaagttaggttggttcggttggccaatgggagggtgggtgatagttgggagaccttcagtgccatattgaagaatttaaagttgatggaataaaaacattatcactttttaaatccccaaagttaaactatataactgtttctgctaattactcagagagtaatcactcagaagagagtaattagcagaaacagttatatagtttagccttttggacaggatgatgttctacctgagagttctggctaacttgtttgttccccctaattttttgtctttataggaaatatttctttaaggactcatcaaactgtgtgcaaacaaggtctgtttccatctctcccccttttatcatgacatcactagaaagcagtttatagtagtaatgtctttggagaaaataataaactacgaagtctcttccatctaggtgctttcattatctgtatctgggcaggccctgactagagaaaaaaaagaaattatattcaaggacaaaatagagaccagtgtttgggctgggaagaacagagattttattctttaattttgaaggttgatcatttgttactttatgaaaaaccttgtagccatttttaaatagtatctgatcttggtctttccccctaaaaaaggcaagaaaggttaaattcaaagctacctgcacaaatttcagacccattttgcctgagcttttttgcatttgtgaagaagtgatcagacttgacagtagagttgttgggagagtttgaaagtatgatatgggtatggggtgaaattgatttccagcttaattaaatctattgtgaacttgttagtgaagcaaatctacatgttaattgttgtaaaggagttcccctcaactcacttccatggggctttgtgttattctcaccgccccctcccctgcctaccattccagttgcttacccactcatcctcagcatggcaggctcggccattcctcaacaatgacgttatttgtccttttaaaatattccgatcgctcatatttgctctctgtttcggacagcagtggaaggcatttcaggaaaaaaaactgtgttactcaaaataaacatgaagataatattgagaggagtgaaatgaaataaatttgctagacggaaaaagagaaaaatccaaaggaaggaatggaaggcacaaacccagtaacatggtggcgtgggtgctatctccaggtgaacaagacagaacttgcaggcaacatggaatctcatctcccatcccactcacgtcctttccactcggccctgcattctcttctgcaggtttgagatggcccacatagccaatgtagagctcttcaggagatatttttacagaaaatcctgatcacatggcctccatttgtttattctcttgccgtttttgtttttttttttaactttttttttttttaagacagagtttcactttgtcgcccaggctggaatgcaatggcacaatctgggctcactgcaacctccgcctcctgggttcaagcgattctcatgcctcagcctcccaagtagctaggattacaggcacccatcaccatgcccagctaatttttgyatttttagtagagatggggtttcacaatattggccaggctggtctcaaactcctgacctaagatgatccacctgccttggcctcctaaagtgctgggattacaggcatgggccactgtgctcagcctattttttactttttttagagatggggtcttgctgtgttacccaggctggagtgtagtggcatgatcatagctcactacagccttgaactcctcttgccattttttttatccttaaaatttccatgtctcactctcttgccaactgttctctctcatttggtcccttgattcactctaaactcaaaccctgataaagcagctgatcggtgaagtgtctgttgttactaaagtagaagttagaggcagaacagtggcagagagccctggaatctggcccttggtaggtgctccacaaatgtttgttgaacaaatgaataagtggagccaggttgtctatgccctagtcccagctctctcacatgcgctagtgagagatatatacatgtataaaaaaaaatctccctgtgcctcagtttcctcatctgtaaaatggggaagatcattataggcttgtaaatgaaatgaattaatacttataaaatgcttaaattagtcctggatcaaagtaagctttcaataaattgtaagctcttatgttcaagctctcagaaccagaatactcgagatgcagacaaaacattacctctcttaagaggtttgttggggaaagtatagctggagttaaaaatttaacctcttagataagtcactgttcaagctactggttttcatctccaccattccacctaaattgccaccaccttgctgaattagacacacttgaccacccttccttcttggcctagtgtttttctgggattgtccgtaacaccaaatatttctctaaactcactaaacatctctttttaatycccattgcaaaatcctttttgtttacctgtacttattttttaactttcattttgaaataattataagttcacaagaaattacaataataatatactgggaggacccaagtgtctagtgtccttcagtggtaacatcttgcatagctatagttcagtatcaaaaccaggaaaaatgcattgggaaaactgcagagcttattaagatgtcatcagttttatttgtacgtgtgtgtgtgtgtgtgtgtgtgtgtgtgtgtgtatgcgtgcctatgcaattttgtcatgtttagctttgtataaccaccactggaactgtttcactaccacatggctcccttgtgctacctctttatagctgcagcttctaatctgttctctgtctataattttataattcaaaaatgctatgtacatgaatctgtaaccatttggcttggctttctccattcagcatgattcccatgagatccatccaagttgttgagattatcgatagttcattccttgttattgctgcattgtgtcccatggtacaggtgtaccatagtttgtttagcagttcacccactgaagggcatttgagttgtttccagtttttggctattacaaataaagctgttatgaatatttgtgcacacagacatacattgtgtgagcataggttttcatttctctgggataaatgcccaagagtggaattgttgggtcataagttaaatgcatgtttagctttttaagaaactgccaaactattttccagtgtggctgtaccattttatattccgaccagcagtatatgagtaatatcacttctccacagccttgccagcatttgatgttgtttttacgtttcactttagtcatgctgatgggtgtgtagtgatacctcattgtggttttagttgacatttctctaccggctaatgatgtgaaaacatcttttcgtgtacttatttgctatgtgtgttatcttctttggtgaaatgtctgtcttttgccttctcatatagtttggatatttgtcgcctccaaatttcatgttgaaattgaatccctggtattagtagcagggcctggtgggaagtttggatcatggggaggatacctcataaatcatttttatagtggcaagttctcactatattattatcatgagaatataccatcccctcctttctttcttcttctcttaccatgtgatgcctgctcccattgccttctgccatgagtggaagcttcctgaggccctcactggaagcagatgctgataccatacttcttgtacagtctggagaactgtgagccaaatcaacttcttctctttataaactacccagcctcaggtattcctttatcgcagcacaaatagatgaaaacagtctttttctaatgggattattattttattgtggagttttaagagtcctttatatagtctagatactagagtgttgccagagatgtggtttgtaagttttttcctattttagcatgtttttcttcctctttgctgcatgtattagtttcctatggctgctgtaacaaattatcacaaacatggtggctaaaaacaacacaagtttattctcttatagttctggaggccagaagtctgaaattttagtgagccccaatcaaagttttggcagggccgaataacttctggaagcctgccttttccaggtactgaagtgacatttatgacccatccctccatcttcaaagccagcagtgcagcattttcaaatctctctctctctccttccgttatcacttcgcctcttgccttctgtgggtgccttcaggacccacctgaatttgggataatctctccatctcaagatcctcaacaaatattttttgcatgaataaatgatttgtctcttctgtgtaccttgatctctgtgtaattctacacttaccttaaataaaattcttagtataataattgccatagctacactggtagttagcatttccattctccttaactgtccgtcttcttcctggctttcttctctatagtagcctatggtgcatttgtctatattaaccaaacctcgggactcttcaagccttttgaacttgcataaactggacatgctttaaccactgtcacagaactgggacacaaccggcctgtggatagttcataaaatagtcctgaatgcagtcttactgcatcagatactgtcttctcacatctctccatgccccatctctgacccaccaaccagatggagaaaagagaggcccagtttgctcctgctgtgggcgtctcctttttcctctaatggccaaatgaagaataagtgtccgttgaacatggtgggaataactgaggaaatcctgtatgccttataataggaagttgtcactagttaaataaagtagaactgggagtaagagactggtgcaggagacagaagacactgttttaacaatgccttcaactttgcactttatatgccctatgatgtgtgtaagtacctgcacttaagtgagaatcaagtcttccaaagtctcttcagggctgccacagtaaggaataccttgcctttctggaaacagctgtacagcagttatattcttttgactgcattgagatgggaatgaatgtacactagtccaagggttgtactcttcccttattctgactctcagaggcagtatcaggttatactgaggcataacctgcctgcttaagctctccgcctgaaggtagagttaattttcctagggcccagagctgctatcatgggacaagaagaaaaacgaatggcctgtgataaagggaactttgagaatataataattggtttgccattcctgggatggtagtcatggaagtgttcctaaacttgtttttctcattgatttttttcagttgaggtatactttatatacagtgagatgcacaggttgtaaatgtatccttcaatctgttttgaataatgcaaacatctctgtaatccatgtctttatcaagatccagaaagttttcaccacctcagaaaatttttttgtgtacctccccaatcaatctgcacatcctcctccatgaagcaaccactgttccagtttctgtcattgtagtttagttttatctattctggtactttgtgcaaaaggaatcatatagtatgtgtgcttttgtgtgtgacttcctttacttagcatgtctatgaggctcatccatgttgtcacagtatcagtagttcctttttattgccgactagtattccattatatgaataggacacagtttgtttatccattttcttgttgatgrccacctgtgcagtttcaggttttggctattaacattctttttcaaggttttggttctttttcaaactttctttcttcttctttttttttttttttttgtagacacatattcccttcttttaaatacttaggagtggaattttgttatagactgtgtgtgtgtttactttttaaagaaatttccaaaacgtttttcataatgattgtgccattttacatagagtacttctaaactcttattgtctcacatagagtagaaattgtgggacagggtgacatccagtctggttacctttagctattgggactctagaggataatttctataatttttagagaagcaaaggaatttcagtgaggaaaggattgtaataaaggatctataagtgttatttagtcccctacctttttgcaaatatgtattctatctctgaaaagacacatagaccctggcacttcaagaacagtggtcagtcacagtctcctttgatcacgtctatttccaatgagaagacatcaggggctctggacctatcaaggggattttttttgagtctcccttaacatggacacaacacagaacacgggcactaaataccgtaatggaactatattccagaaaagggaaggctgcacttctttgtttcagtctttgtacatgtgtatcttgttcatgctgcatctctttctctcctatactctcttcaagtatggagtattacgtcttacattttccactttgtgtttcaggccaaagaagccctcgaaaatactgaagttcctgttggctgtcttatggtctacaacaatgaagttgtagggaaggggagaaatgaagttaaccaaaccaaaaatgtatgtgagttgagcagtataattgcaaacatacagtagtgatgggtggactggagagaatttaccacagttggtgtgaaggtgagactgaatatagtcccgtagctgccagtggtgggtagcttttcttaacgtctctctttttcagtatcattttcttcctgattttgaaagtgatacatgttgattttttttattgtggaaaattcagaacaatttaatgaagccataaaatcttagtgaataattttctgtttcatagagttttactctaatgcttgagtgaaacccaagaggggattttatttcatcagaatgtcagcatggaagaaacaagtctgtctctactttaagccartctaatatatgaaattttcattttataaaataggtcaatttaactcataatacattccttttttagtacctttaaataatattttcatcctagtaagttaaaaaagtatcctcaatgtatagctttggagggaggtatgaggattatataaaggaagctattcctttatcagataattcaacaaaatagggtcttcaacaccagctgcctctgtagctacatgtagcatgtacattttaatagcttgtatgacttttattgtggttaggttgggaagttcatggttcaaggcaatgcttcttaaacatggtatcacaatagtgtgtcatgataagtatacttgggaagtataagtaaactaccaaattttatgattacaaaaattcctaggtggactcaaagatcacttatacctgtaatgccattcacacagacttttatcttgtcatatgattttgggagccagagaataagctggtgttgataccagggctgtgggaactagttcatctatcaatcacatctattgaaaagaaaactgatatttagcaaaacacatgtaaaataggaatccagattcacaaatcatttatttacttatttatttttagccataaaatagaacaggattatattttaatacgtaacttctgtacaaccaaaaaaataaaacaccacagtaaaataaactggaataaacatggtatttcatttgcaatgcttgacaaaatgttcacatccttaatcagaaatgagttcttagaaatcagtaacagagagactaatattacaagggaagtgaaaataaaaggaacagaggaaaatgaaataacaaccaataaggctacatgaagatgatctaacttaactttaacagaagaaaaaagcaatttctttgtaacattagattatcagtgattaaaaatactgatatctaatgtttgaacagttttagggaatgggaaacgttcaaacactgggaaagcttacattgattataggaaatttactcaaaatgtagattttgcatatacttcgccctagcagttccaatcaataggaactgttccgacaaagtagttggacaattcagatttatatataaccatgttcactgcatagaaaatctgtagttaatatgtcagccccccaaaaaaacttttttatcaatttgcttatgaaaaatagtagatcgaagtgtagaattagaaagaaaaaagacacttaaataaaaatatagtatttcacaaaattctttgtcctttgaattcttgaaaaagacaactttttaatgaatcagttttaaatttaccctgtaataagtgagaagcatgaatatatgtaagtcatacttttaatttttatttatttatttwttttttttactatggaaatgctttaatagaggtgaacacacagcaagaacagcaagtgcccacacagacatgactatcacagaacacattgtgggcaaatgaagaattcataccacccccgcccttaacccagtaacagaaggctctacgcccccatttcctcagtccactcctcagactctccctcctcctcaacagtggcatcctgatactgttggtactctgataccaggtcattcatgttgctctcggccccagtgaattccatctcattcttgccctcgcccatgtaccagtgcaggaaggccttgcacctgaacatggctgtgaactgctctgagacgtctctgagcagctcctggatggccgtgttgttactgatgaaagtggtggacgtttttagtcctgyggatgggatgtcccagaaagctgttttcccattgtaggggatccagtcagcaaagtagctgctgttcttggtttggacatgaagcattttctcctctacctccctcatggacatccagcccctgaaaatggcagcctctgttagatagaggccatactgggggtcataggcagccatcatgttcttagcatcagacatctgctgggggagttcagccactgtcagggccttctttgttgtttaaatgctcattttgaaatacctttttaaaatttcaaatacagaaagtagaagcagttctatctcatttctctatgcagaactattaaaattttgccatattcttccagacagttttctttcatataaatcatgtaacaatatacaaatatatacagtcttttaattttaactcacatgtgcaataatttcaaacaatgttaaaataattaccattataacactgagaagtattataactgccagggtagtcattcccatatagaattaacatttttaaattagccgttaccttttcagttagaaaaaaacagaagcatgtacacatacctctgcaaacaattagctgatgtttgttgaaaaatgacataattttaaatatcaatttaaaatactgtaaaacatacaaaaattctttttgaaaaagatgttttgaagaatttttaaaaatgttttaattacattcatgttgaatcacaaagcagttattaagaggatattaaaacatgagataagtaataaacataatacagcaattaatgaatgtatagatacttatttaggagtagaattctgtattttaaatcgtggtcaaattttccaatttgcattttgtgtatgatgtcttaagatgagaactttgactgtcctaacaatacccatctaaccccatccagtgaccggggtttcttctatatgctgaaattaacctgggtttattttgttattccgtgtcataaagaagattactctataactacagcatagaaagactcttgaccccaaatgagaagacctgagttctacttttggatctgataccaccaccactacccagtcgccaccaccacctcctctcccagctgtatgtgattaacacatgccagctttgcttagcttctttttctttagtagtaagagagttgactgagatgattgagttcagcaattgtttattgagagctgtagggagatttgattccataattctaaatctgattttttgaaagcacctaagttggggaaaccttttttttttttttttttttaaactctccacttagttttggtgtgcagccaggtttgggaacctcttctgtaaagtaccttccatctctggtaattagttctgtgattcacccatgtagccccttggccagctctgctcccatctgcctctagcttccatggcatcttgggccactgtgctagcacttttcataccctgccctatctcacaggtaaatgagccctaccagattttatgcttgttgaggacagagactttttatcctacacagaatttatttagcccagtggcttgtgcatggttaatactcagtgtaaattattgataaatactattgtcatgaatattataaataattattccatatagaatctatgattcactttaagctattttagtaagggagaaagaaaaggagacaagagctagcagagtacatgtgtagtattatgtggcaccatgcttcatgtaattcagatttataaggtttataagtgtagataccagtgtataccattttacatatggggaatcctagacttacagaagttaagttacttgcgtaagtccacataattrgtaatgtcactgtcaaaattcaaatttaaatggagtcacttccacatgctatgtgatttctcctatcctctactgcttcccatgaagtgtctgaaaccaataccaaatctctacttctctagagtcttccagtatataaaacctcattccccaaaagtgtaagagatgacattccagtgaacttaatgtagatttgcttggagtgaggtcagtgacagccttgaaaatatatttgaaactagagcacaagcttatgaaaattttgcttcccctgaaatattcagaaaccatagactttatctttttttctttgttttttagacttaccttctccatggcattttaattgaaagagttttccctaaggtacttaggtacttaactaaaaatacagcatgattcctgtggcatctctgattagatatctttcgcaagtgaggttatggtacttgaattggggaatacgttgtccactgctaagggtgtcttgaaactgtattcattaaaatattggcagaaaggataggcgcatattttgtacttagtttttgtatatttgtaaaatagtagtcacatgaagcaaacagcatcagtgcaagcccctttctcttttcaggctactcgacatgcagaaatggtggccatcgatcaggtcctcgattggtgtcgtcaaagtggcaagagtccctctgaagtatttgaacacactgtgttgtatgtcactgtggagccgtgcattatgtgtgcagctgctctccgcctgatgagtatcctttgacttcatgagttaatgtatngtaccattcgtgtgaacaagagagtggccaaacacgtagcctgttttccaaaatatgaaaacacagacttaggaaacaccttgtaaaatatagtgtgtcttagccaaaaaaaagaaaagctttttaaatagtaaaatgacctatttcttttcatatcaataaacatggaatgattaaacaaataatctagagaaagaaaatattagaactgtcttaaacagttatataaaggtaaatcataaattaagttgaagtggattataaaacagtttgcaaaggaaaagtcctaaagaatatgcagctaagttttgcctttggataatggattatgagtggtttaaatttttttttctctgtttatctggttggtttgtttgccatgaatactaatgtatcaaacattatcagtaaaaagtaaataagaagtaagaaatcctttatgatattctgattgtaaatggaaaatgagtaaagttacagctctttggattgtcttgcatggattaagcaacttaaatagtgcagagactctgtagggacttctaaagatctttttaaaaaattatttgaaaattgaaaaactcagctttttagttccttattttttatgtacttattttactatgtacggatggataattttaacactttaaaaataatacagaggtttttgggtatgataaaatgtacagtctctataaaagggttgttataggcaacttagaattctctcctcatcctgccttacagagtggctaagctttagtctattttgtattagggcacaggttatattttatttggggcaagaacagggaagaatctkttatttctaaaaggtgaaaatccctggattaaatttctgcatcctttctggttctgactccctaatgattctgaaaaagtgatttaggaaagagcagagagagccctgaactgtgaactttaagcaaacacatactcagttttcattctgtttgcagttgttaaatgtcaatttctcaatactttaaccccttttcttctgtgtagctggattgtatggtttataagacgaatcctaagcttcactggtttgaagagtagcatgagcgttcctctccaggatggctggtataaacctactctgattttgtcacgatacatacttgaaatgtacattctatgcaggaccttaattctgtcttataaatcccgctggttgtatatggctgtcagaatgaacgatttggtggttgtggctctgttctaaatattgcctctgctgacctaccaaacactgggagaccatttcaggtaatacaaactgcttatgctttttctttcttgctaattattttcatctctttatgggcttgtgaataactagtgtgtggccagtatacgaagaaacgatgatagaatcagacatctttgatctcagggsctctggtggagttcatttatgcctcagtataagatgacagggaagagtttctagatgagtgcctacctctcttcattaacagactccctcctgaaggagagtccacccttcgcagctgactccgaacactcttcaccaacaccgttaggtatgcctgaagacactctcgctgttggagtttttattcaatgaacgttaccagctctatgctctaccaagtttggtgatgcttggcctgtgtcagtgacgctagagactatttacagcacacacaatatttttgtacaaatttaatcattttgcttgattgccacatccttattttagtatctagcaatcactgtattttcatgtctttttttgtgtgtctttttaatgttgaaatttcccccagacttaagaatccatgtctttagtctcctagaaattctcctttccgtttaatcttgccacttctcccaaagtttttatgggtcagactatgaacaaaaggaatttgtatttcagagtttggcctgtgactatacccctactttcattaattggtttgattgtttttctctccaagatgtaaggttaatgtaaaagtattgtgctttaaaaagaaaaagctttaacagatgctggatatggctgggcagttcacttcaaaaacctcaggggttcctagaatactttaaggacctatgaaggactaaatttggctgagtctcactgagaacgagtttttaaaacgttcttgagttttctagctcaacattagctttcctatcaacttctgtgcatttgagaataaatgctgtttaacattacatcagaaaagaaattgtaatgcaatgatggagagtaaaggatacaattggtttgatcattaaagacatttagaaagtgatttgatttttccaatcacttctgttagtagctcaaattttgcttacataactctttgcaaatgaattgctgactccatatttcctttatgagaatgatctaaataatttttcagtttctgggcagaacaaagatgagtcttttgatgtcatacatgggtggaatatttctctccaacatgtcagtgacatgagggcacaaacacagtcctttctcacacatctttgtagtcgatgcagcagaaccaaaacaagttcatttgcagtgtatatacctagccacatcggctcagctgcaaatcaatgcctgtggcttgcagccatatctccaggctgaatgccaaattatggtttttttaaaggtgcttttagattctaaggagaacagtggtggcccaggctctgaatgctgggtattctttttttttaattcgtctgggcttaggaggcagcaggtgattgggaggtgggatactgtttcttactgcagaattgcagattcttttcatgctgtattataagcagcattaaaatttctagaggcctacagaactattcttttcaaagaagatggtgattaattataacacctgctctgttttttaaaatttttgttttatggctgggtgcagtggctcatgcctgtaatcccagcactttgggaggccaaggcgggcagatcatgaggtcaggagatcgagaccatcctggctaacatggtgaaaccccgtctctactaaaaatacaaaaaattagccgggcatggtggcgggcgcctgtgatcccagctacttgggaggccgaggcaggagaatggcctgaacccgggaggcagagctcgcagtgagtgagccgagattgcgccactgcactccagcctgggcgacagagtgagactgtctcaaaaaaaaaaattattatgaatgtttgctttttattaacaccacaaatttgttgctataatggatacttgaaaatgtaaataatatattatattggtgtgttagggcggtgcagtttccttcgaggcctgtaactcagcagttctcatcccggactgcccgttagaatcacctggaggcttctgtgcctgactctgctcagtccctgccccagaccatctgaatcagaaggcagggggccaacagtgctgtgtttccagagagttccaactggttctcctgagcagcaatggttgagaaccactgctctcatcccacgtaagaggagagggctctgagtgtgcgagtggagtggagggggacctctggggagctccagcacttaacacagcaggaagcagggggcagctgtgacgggactggctggcagtggttaggatggtaaaatgctgagaagccaagggaggcaagagcggtcagacagagcaggtgtggccagttgcctccaggactgcagagttgaggaatctgaaaggaggcaagtgttttggtcagtagggacctggggatttctgagagggcagactcagtgaagtgctgggaactcaagccagtgaagatgaggccactgaggagtgaaggcaggagcagggtgtcagcctttgacgggacagggtggatggaaggttatttgttatggcgaaggtttatgcaggtgtcggaggcccaggcaagggcagactgaagacacaggagaatgggaggttcgttctgaacagcatctcacagtagctggtcctcctgtcctctgtgcctatgctttctggctccttccttccagatgctcattgtgtcacttcatgcacttcagaagggtgcttggttttaagtccaaactcttctgacaagctttcaaagccgtacatatttttaccccaattttttgtctttctttccttatgcttccttaatagtctcctcctctgtcagctgatttcctcacacacaacccaggcttcttcttgccctttccctgaaatgctctgcttagcctctttaaatattctctatctctaaggcaagttcaagtttcatgttcttcaggtaatatttcatataacactccttactgttagcacaatttcttatttattctttcacatgttatgatttcttttccccagttagatgctaaagatagaacaagctgtattttattttttaaaatcctctgtagcaagggttgataaactttttctgcaaagggttaactagtaaatatttcaccctttgtgagccgcttacatctctgtcacctagtctttttttttctttaacaaagcttttaagatataaaaaccattcttagctcacagttctcagctatggaacagatttggtccaccaagtataatttgccaaccctagctctatagcatggaatgcttaatggaccactagtaaataggagcagataaaaataactaatgcttaatgagcacttatgatgtgcctggtatttaacaggtattatctcacttaatcctcacaaaatcccctgaagtaagtgctattattgccagcattgtataaataaggcatggagagtttaagtgcctaacccaagatcacaaagctggtaacttctataatagttaatggatgaataacagttgattgggagtgatgcctaataacagttgattgggagtaatgaaaaagatgatatatcaaacatcttttggaagtgtacctccttacccatgttactaatatccccaaagtttattaacatctgaaatctgtttacataatcatgtatatatatgttgtttttatgggatacagcacacattttcataggcctatgtttattctcaactttctcattccatcagtgtatccctggatatcgggctgaggaagcagtggaaatgttaaagaccttctacaaacaagaaaatccaaatggtcagttttctgttgtggataatgtccttcccttaaatccatacaaagagaatctgctatgagcttacctcttcattttctttttcttttctattcttttcacagcaccaaaatcgaaagttcggaaaaaggawtgtcagaaatcttgaacatgttctgatgaaagaaccaagtgacccaaagtgacctggacaagattcatagactgaaagctgttgacatcgttgaatcatatgtttatatattgtttttaatctgcaggaaaatggtgtctctcatcatttgctctgttaagggaacaaattagcactttttagaagtctgacaattgtaaacagttattagcttttccagaagctgattcccattttaagatgggggaaaattaaggtttgaggttttagaaattagcaagtagtgcatacccttctagccacaagtgcccagtccaggmaagtgctgacttcttagagaatgtgtggccagacccagggacctggagtgtgtttggactgcagtttgccaccctgagaacaccttctccaggactggcatttcagaatcagattcttcattttttgcagctacgatgttcttccagggcactgggggctgtgacttctctctaaattgtatataagttgtgtatatagagaccataattatatggtccttagaaaagactttgcttttataaagcatttagaaaaaatgcatacttttaaaacaagtgcttgagttgtcacttaaaaattatagcatattgctataataaaaccttatttatgtcttatttgaagatgaatagtcttaaaagataaagacataaatgggacaattgttattgagcaaaaaaccaaattatcccaccctcatggagcttatattctagcaaggggagatggatatgatagattacacagtttattggaggacaataagagttatggcaaaaagcaaaaggaacacagggtaaaggggataggtgccatttggtggtgagaatgctgactgaaaaatagaatgrtcaatttaatctgaaacaaatggttatttcttttataatccatataataaatttaaaatctaaaatgtaaaattttgaacacaacactggaaagggtatccacagcaggaagtccccagttcacctccatgactacagggcagctttgcacagccctctgggcgcactgtgtgcctctgcccagaagggggcctcgccgttccaccagaagctcagctccaggccctggaggggctgctgctcctcagttgcatttcttcagtagattcatttccttgatgcaaagcatctgtatttgttggttctgtcatttgagcgatgtctctgacttgtttgttttgaattacattacaggctggaatgtaattgtggtgaaagtatttttatattgctgagagtagcagctaatcacagttacatgcttcagaggacttataattgcttggttttgtgtgtgtgtgtgtgtgtgtgtgtgtgtgtgtgtgtgtgtttaactgcatttgaaaagttttatggagaatatgcatgattttaaatctgtgataatgttacatgcaccttcaatttcatccactttaaaaattatcttctcattgaattttagtgcttctactagtttgttcctttttgcagttggtcgtaattcatttctggcttcttatgctttcctgcaagcagatttcattgcatttattgtgttcatatcattttcttggggattatttgtaggacaaccaacctggagttttgcctctctagagtaccacccagtaagtctggctgagcatcttatgtccagtaggttcttggtaaacatttgctaaatgaaattactgattgaaatttggggaaaagtgaataagaagactatctaggacaaaaagccaaagccgaaaatagtatatgagcattctagcccagagactgtcgctactaaaagaatgaaggaaataataaagtgatagacagggaaggatagaaaagacttaacaatatacatatgttccgtctttgctgttttggagaatgatggataagtagtgtttcctgattctgaagcatagctgaacaatttaattgtggtttaccatctttttggttccctcttcagtaattaacctatcgaaaatctgtcctaaatgtttggactggggcacagttccctccatcgctttgggagaaaatcattaatatggcatactgcagattggagggcaggaccactgagggtgtcatagacattagctctatggaattctgctagcaatttccaagtgacagtgaggaattatggatatatgttgaggtcattcagcttcctgagtaccacattccccagctacttagacacgggttaaaatattaagatgtcctagttcaacagcttgaattccattgattgatactgatagtgcctgtccaagacaccagctgaaagacttgttttgtgtacaaaatagttctgaaagtggtgagatacaaaaaggttttagaatcactgccctgttgagagaaattagggggaaatgattacatttagaagctgctagagttatccagtgtttgctggtctttgcaacaaactgtggagaatgggtggtatgtaatgctttggtaggcttcaatcactgataaaagatcatgttaaaatatctttgtgctttcttgttacttggcacaaccatctcttcctgtgttgtatttggagtatcatggagagaaaatagatggccaagagcttcagtgtaggcaagaactcttaatttttctttaaactttttactgggaaaagtatatatatataaaatacacacacacacacacacacacacacacacacacacacacacacacacacaaacacaacacaccatggccctttaccccgaaatgcttcagtatagttattgacttaagtaaatttaacattgatatacttgaatctatcatttgtattacagttttgtcagctgacccaataatgtcctgtaaagaagttctcccactaccctataatcccaggtccagtctagggtccagcattacatttacttgtcttgaatccagctttttcttttttttttttttttttgagataggtctcactctgtcgtccagtggcatgatcacagctcactgcagcctcaacctggctcaagcaatccttcctcctcagcctcctgagtagctgggaccacagactcatgtcaccacacctaatttttttttttttttttttttgtagagacaaggtctcactatgttgcccaggctggtcttgaactcctaggctgaagcaatcctccttccttggcctcccaaagcactgggattatagacgtgagccactgcaccggtctgcctttagcttcttttagtctagaacattttcactggctttctttgtcttttatgacattgacatttttaaataatacagtcattttgcctcctttctgttttcttcttctttttttaaataatagaatggtccttgttttaaatttatttgatattttcttgtgattagattcaggtgctggttgatgttaagttcctcacaggatatcacatctggaggcacacaaaggccgtcacaccaaggtgatgtcaattttggtcatctggtcaaggtgttgtcctattccttcactatatagttaccttttttctctgttgcaatgaataagcagtctgtgggaagaggagctgttacattttaaacagaaaatgtatttgacactgatggaaaggagaggaggaaaattaatgacataaatttcaaagcaactattaaattatttgattgcattcytcctcttttactgtctgccaaaattgataaaaaaaatttttctaataagaatgttttaaatagtgatatcttaataagcatcaaaattaagcctgagaaataaattctttccttcctaatttcctcctcagcaaaagtaataattatataaatttcattatgcctgataagatagggttttggaaaatagacctaagatgtttctgatactgcagatgacctatggtgatccaatgggataaacactctaggtaggttgtcatttggtcataaaatatgagttatcttgggtttccatagagacatctagacttaaaatgttgtaagcactgctactttcaaaatgtcagtaaaaatagcaaaagccaaagctcttgaaaaaattacttaaatcttttttaaaagtagtatagcgccttgttaaaaatctgtggtgatgccaaagcttgtctttcccagtggtcctacgtgaactggccttatagccccagggaaaccagacaccaggaattggtttctctgccttttggcaaaggaataagactacattgacttcatctatgaagacaactgccaactatttcctttgtaaattgctaattttgtgtagtgaggaaaggagcgatgggcgacgtgatttttatggattagactggtgagttctgctgaaagtttgacatctttaggatcttacattttcttcaagttgagctaatgaaaacaggctcgtgactatttatcacctgatttctaagtggatattgggttgaacaccacatatccatgactattaaggaggcttcatggtgtagtttgacaaaggctctctccttgaccaaacttcagtcaggccctaagtcctctttttaaccaggcctccaccttggcccccattcttgatgggcctatacagcccagctttagcaagaatcctgctaagctagtttagagagaatcccacatccccaatatctatgaaatttctcatcccctacttttgatgtgtaagtccttggcctcccttcaacgagaagcctgttaagttcattttgcaagaactctactcttgatatctcctcttagtaatttcctaatcactgaccccctcactctgcccattagttataaacccccacatgttctggttgtattcagagctgagcctgatctcttcctcttgttgggatagttttaaaacctgcgatagttttaaaacctatcactgtagtcctgaattaagtcttccttaccttaacaagtgtcaaaataaatttttctttaacatgttgaagcatgaacttgagaatctagagcaggagtccacaaagtatggcccatgggccatatccagcccgctgccggtttcggtaccactcatgacttaaaaatgggtcttacaattctgagtgattgaaaaaaaatcaaaagaaggataatatttagtgacccatgaaccttatatggcaatcaaatttcagtgtccataaataaagttacattggatgacagccatgcccatttgtttctgtgttgtctgtggctgctcgtgtgctacaatggcagagttgagcagtggtgacaaaccatgcgactcacaaaggcctaaaatatttagcgtctggcccttcgagaaaatgttagctgcccctggtctagagtaggtaaaaggctgagattggaagctgcttgttcaaattctgtgattggaaccgaatgatgtggctcattgtacagctcatggtgaattgcttcagtaccatggttttgttttttccttttgaaaagttggtctataaatgtaaaggaaaaatctaagataccaaaatatgttttctggcttagaatgttttatttccttgtatacattttaagagagtggcaaggagaaaagataatgtatcattttatttgggtttagaataaataatacattttatttatgatcatcatgtttaaaatattattttctgttactgtctctgttttacatcaagtaagctgaggcacagggagattatgtaacttgcccaaggtcacagagtgctaagtgatcacatcactcagaaggagctagttaaaccaatgtaacagccttcaagttttagtggcttagaaccaaagcttatttttctcatgccttgcttcttgtccatctcaggtcaggccaggagcctaggctaaaggaaacttcaccaccggggacatcagctgctgtggccagagaagagaacatggtgaataatgcttcataccttagggcagggcttctcaaacttaaacgtgcataggcatctcctggggagcttattaaattcacattctgattcaggaggtcctggagggcctgagatgccatgtttctatcaaccttctaggtgatgcccatagtgctggaccatgggccacactttgagtaaggagggcttcctggcttttgcccagaagtgacacatcacttttgctctcaaaagaattaaagcaagtcacatggccatgcccaacttcaaggcagcagataatataatccattaactacatcagggagaagagaattggaatttttgtgaacagctccaatgaagagcaaacaatgtgaagctaggatctgaattcaggcaggctggccccagagtctgtgctcttaattataactatatacagtcatgggtgttggtccattctctataaagagaatgcctgccaggcagacagctagtcagggagttacagttgacttgtgtgacttgacaccgggtgacttaggcagctttagagttcagtgcagcagttctcagcatggtgctgcaactctgaagtgtttcaattcatttttttatcttaaagtgccaacatttatgaattattgttaaattaaaaacatagctgggagcggtggctcacacctgtaatcccagcactttgggaggccgaggcaggtggattgcttgagctcctgagttcgagaccaaccaaagcaacatggtgaggaccttgtctttacaaaaaatacaaaaaattaaccagggtggtagagcgctcctgtagtcccagctacttgggaggctgaggtgggaggattgcttgacccaggaaacagaggttgcaatgagtacctctgcgctccagcctgggtgacacagcaaggcaacgtctcaaaagaaaaaattaatttttttgagacagagtctcgctctgtcacccaggctggagtgcagtggcgcgatctcggctcactgcaagctccgcctcccgggttcacgccattctcctgcctcagcctcccgagtagctgagactacaggcacccgccaccacgcctggctaattttttgtgtgtttttagtagagatggggtttcagtgttcaccaggatggtttcgatctcctgacctcgtggtccacccgcctcagcctcccaaagtgctgggattataggcatgagccaccccgcccaaccttttaattaattatttttaaaaacataccttttagtagaatcaagcctctatactctctcatctaacattctgctatgctttcttgttttggagaag

SEQ ID NO: 94036 - DNA, 12483 bp, Homo sapiens
  misc_feature (1)...(12483): n = A,T,C or G
gcaatggagaatgatgttaatttaaacttctgccttattaagtaacaaaacccagaaataatgtgatcaaagccaaaagacacaaacttctgccatctttcttgagataaaagcagtaaaacacccattaaatgaaggaggcttggacacttaataaaaatagctaattaagtgttggagtaacttagcattttgcctcatgagtcctgcaatactcaagactagcctgtatcccttccaatctcactccttcctgctgtggttcaggccatcacataattcttttttcgttcccttcattatgtgccagactgttgtatgtactgggagtacaaaagtgaacagtagaccagattctggctctagagcagcttatactagtagtagtggatttggtgagcaggacagaacaagcaggtgttaaattcttagacaaaataaatcagcataagaagaatgaatgggggtgggaggagacaggagctgcgtcttggccatctcatcaaaaccctgaaatgcccataacccctctctttttgtgtgtcctgttacagagtctatttttcagtggtgtgggtgaattcagtgctatacaagttttcttctctcctcctcctcctcttctttttcttctagtctgcaatatttttgaaagtgcctacaatacgccaagtatacaaaaaataaaagaggcccagtgctcaaccaatgagggcccaccatctggctatgaaggcagaagttcacatcaataaccctgatcaggataaagctgtagtttcctaactttgccaggtgacagagctatgagcggtgagtttaaactgcagatgcctggaatccactccagatcctgccgaaatgaagtagtgtagagtgggagggggacagaaacactggaattttaatcaacccccccattaatttcaacgtataacaaaagttgagacaaagattgagatctacagtatcaaggaaaacacactggacttaaagggcagaagttactaaagctccttaggacagacccgcagccttattaggtttgggattctgagcttagaatagtagctaggcccaggtgcaactcattcaatggaaacattaatgaaagaagatataagttctaatccagaataaatctggtccaggttcctgtataataaaagaaatagtatcacctctgattagtcttgtgtaatttaaatgaaataaaataaaatatgaaagaactattattgtattttgcacataatagatgttctgaaatcgacggttttcactagccttggcttctttctatagatctagatcattgtgataaatgctgcagtgggatttgaatttcactccaactttccttcagtttttttttttttttcctatgagcaggaaaatatttaagagaaaagcatccttatttcccatttttcttgctagtcaatactaatggatggattttttttcttttgcctccagccaatttgatgagaaaagcacagataacactcatcactagaagctgactatatacacactggtagccaggaaaatcctagaaacatgggctagatggacttttcaggatcaactgactcaacccttctgtattttacatcacaaacctgggggccagagaaggcaagtaatttgtccacggtcacaaagccagctaatggcagagctaagacaaatacctaatgaaatgatgattttcagattttctctctgtggtcttgcaccccaaggatcatgaaggagatagggagtgggtgaaaagagtggcggggtccctccagtcttacttcaactagagaaagtcagctttttatctcttttgtatagttaaatgtcctcagtataatttcatttgaagacacaattttaccactaaagagaattgaaaaaccctgcactataccaccctggagtttttgtcacaggttgtattatttgtttccttcctactacctaactcattgcaaccattataagaaagcaataaaacaattgtacgcatggtgcttggagcctagagtttccatgttatcttccatccaaatgtccttcttgcctaaaataagatcaaaacatcacgaagctttcactgaacatgtacaagagaacaaattaatacaagagaccccataggtttaagattccaagtgcttaggagatagtgaaaaccaaataagggaagtcttctcaaatatagtgttgtagatttggaaataattaattagctcttcattattagaaaagtatttcaaatctgcttatggttagaaggttaagtcttaaggttccccttaagactttttaaccaagataagtaaaatgtctagctaggattaaaggtagatgtgccaggggctgctacttgcttacccaatggccattctctccttgtgaacaaacatcagttttactaaaggaggaaatgggcttatccaaatatgtatccaacctcccttgcagttgggggatgtcacgtgaccgtattatgagtaatgtgataggagtataaatgagagaaggactcccgaaatatctcttaaaacaaaaattggcacatttatttttgccttttactcacccagtttttcctgtgtgaacatggacatgattgctggcataccagcagtcaccttgagagcaggaggataggagttatgccctagggctgggcgtggtggctcacacctgtaatcccagcactttgggaggacaaggcaggtggatcacttgaacccaggagttcaagaccagcctaggcaacatgatgaaaccctgtctctaaaagaaaggcaaaaattagtggggtatggtggcacaagcctgtagtcccagctacttgggaggctgaggtgggagggtcacttgaacttgagccagggagatctgattgtgccactgcactccagcttgaacaacagcgcaagaccctgtcacgaaaaaaaaaaaaaagttgtacaaatggaggagcacaaagctagaaaggccttaagtctttcacggcctcagcctgagtgcccatctccaaatgtgttttacatgagacaaaaataaacccctaatgtcttcaagccaccattttgtcattgtggctgttgtttgttttgctttctaagatttgttactagcaaccaaacagaattcayagcttcgtaggcaaaccgaagtactataaatgaagctaagcttaaaagcatttcctatgtaacaggaagcattacctgccaaaaatctgcccaagaaagcttgttcaggtgagacttcctgacttttttatgtttttccagcactgaaatgttrgaaagtgcacatgaacagtaaagtacatgggcagctatccaaagagaatcattgtatgtttacccagcaccatacaatgaacagtgctggatacgtgttgtccatgtgtctatattcctaggactcaactgaataaaagaaagagaaaattcaaatcgttttcaagacagacttatgtggccatttaggccacaccactaactttgacaagaccattttcagacttgccgtatgactgtagtattaaatgacatccatatttaccacccctttgcttagcctctgtatcagttctcttaggcaatgtagactaaaaagcataaaaccactgagtctcaagtagggcttccaaagccatgacraagcataggaagtgtgcattgaacacatttgtatacgtgtcaggtatagagaacagcagagtcaaacagagcatgccttttgaagtcctgaagttgactaatgagctgggtagaaaatggcattgcgaatgtttccctctggcctctgcaagacggaggcaagcagccaccctcaggatatctgctcagcaaggcactgggaagatcactggggagctcagaggcactcagatacagttatcagcagacacagcagcaaactggagagccaagagtgtggtcatctaaatgccagaagcagcctgcctcaaagaccttcagtggagaccccaaataggaaggaccaatagtgkccaatgatgctgatggacacataaaagattgtgatttacctagcggcatttttaatttctataggcaggcaacactctatacttacataataagacagattataaagtgtgtaattgacagatatacaatatattctatgagttaagactatactgacagacacaacagatatacaatatatcctgtgagttaaccacagaaagtgaggcttacagagattaaataagttgtccaacatcatatagctcataagtggcagccaatattcaaactcaagcctgtctgcctctaaagcccataccaataaatcctataccatgtaagctctctaagaggaagaccttcccaaagttagtggctaggggcccttactgaagagttgtaactaaagaaagggtccttttgcttcgatgaaaaggttggtgctaaccttttaagtggtggtaaaaagtgatgcacagcattggagtgtggaaacgtccttgtgttctgagaagaacatgtgttgtgtgttgacttctccagtggatgcatgaggcatatgcgaacagtgggttggaagacagcctgcaaagctttaaactccaaccaaagtaaatacatgcatcttattggggttttttagggcagttgtggccatatattaaaatttgaactttgtgcttcaggaatggggaataagcacagggaaagtagaggaagccataatctagaaaaataatggaattgcttcatagagggcaccaccaaagcttaactatctctgtgatagtgatagtcaagtgcataatttatttcagcttattgcaatgttgaaaatacttcatgaatcccttatttccatcttcatgaatctgcaaggaatctaaagactctaagttggaaaacaatgggcctggggaaattcactatggggaaaagtgcagagggagaaatcactatcacagagacagttaagctttggtggtgccctataccaagcaattccattatttttctagattatggcttcctctactctccaaaacctgtgattgttccccattcctgaagcataaagtccaaattttaatacatagccacagctgccctaaaaaatccagtaagagccgctaggtgctgctgtggactatgggccgctggggtcggtgaaggatcccaagatggctgggcaaaaacttgctctaaaaatcattgactgggtaacttcttgggagagcatatcccgaaaccaaaaggccattgctaattccctgacatcctggaatgagattcttacctccagactggctattttacctgagaataaaccatctattgactggacttactacaaggccagtgtggccaaggcaggcttggtggatgactttgagaagaagtttaatgccctgaagtttcctgtaccagaggataaatacactgcccaagtggatgctgaagaaaaagaagatgtgaaaacttgtgctgagtggatgtctctctcaaaggccaggattggacaatatgagaaacagctggagaagatgaggaacttaattccatttgatcagacgaccactgaggacctnnnnnnnnnnnnnnnnnnnnaaaagctcaatccccaaatgccagtacaaacactagcctggcaaaaagtcacctgaattcctccctctaatatacagaacccaagctgcatggacttgttctccgaacacagaaaacattatagtaaacaagggatttgagtttagatatttacccagcttctctgcaccctgagctctttttttttttttttttttttttttttgcctcaatcctctgccaggagatccggctgcttttctcacactttggctcctcacctcccctaagcataaagtccaaattttaatacatagccacagctgccctaaaaaatccagtaagagccgctaggtgctgctgtggactatgggccgctggggtcggtgaaggatcccaagatggctgggcaaaaacttgctctaaaaatcattgactgggtaacttcttgggagagcatatcccgaaaccaaaaggccattgctaattccctgacatcctggaatgagattcttacctccagactggctattttacctgagaataaaccatctattgactggacttactacaaggccagtgtggccaaggcaggcttggtggatgactttgagaagaagtttaatgccctgaagtttcctgtaccagaggataaatacactgcccaagtggatgctgaagaaaaagaagatgtgaaaacttgtgctgagtggatgtctctctcaaaggccaggattggacaatatgagaaacagctggagaagatgaggaacttaattccatttgatcagacgaccactgaggacctgaatgaagctttcccagaaaccaaatgagacaagagaaagtatccctaytggcctcaccaaccaatcgagaatttataaagttgagtccaggaggaagttctggcccttatattacacattctggacattaaaaataaaaatacttatgtagaaaaaatccaataagatgcatttatataccttggttggagtttaaagcttgctagatatcttccccctcccccgactgccttcatgtacctcttgtgtttactagagaagtcaacacacaacacattcttctctgaacataaggacgcttccacactccaatgctgtgcatcactttttaccaccaactaaaatgcccttccttgtccccacatggcaaaatattatctgttcttaaaggcctagctcaaatgccaactccttctagaagcttccttcaggcctgatgccctactttacctccgcattgcccaaactgaattgccccaagagaatgtattgccctttccccttttcactttttttaggtctctatttgatactgtattgctacttctttcgcttaagtgtgtctgtgagctaagtaccataatttattcatatatgaatctctaaaactttgcaagtttctgatatatattgaaccatgaagatagaatgcttgaataaatttttgtaatatataaaaattatatatatttattgagtacaatatgatttttttttaaacagagtcttgctctgttgcccaggatggagtgcaatggcgtgatctcagctcactgcaacctctgcctcctgggttcaatcgattctcatgcctcagcctcccaagtagctgggattacaggcatgtgccaccatgcccgactaatttttgtatttttagtagagagagagttttgctatgttggccaggctggtctcgaacccctgggatcaagtgatctgccctccttagcctcccaaagtgctgaggttacaggtgtaagccaccatgcacgcccaatgtgatgatgtttggaaataagcatacacgtagaacactcaatcaaactaacttttgattggccaggtgaatgtctcgggtataaccagtaatccaggtgctccccttttggcactcaccattctgaccttcgagcactgattgctgaacagatgctatggtgtgatctcattcattccaacttcagccagcaaaagggtctcctgaatactcggtggaaatgtgtcttactgtaacttctaacccttagtccaacttgtgtttccttgagcctaagttacatcagtcttccatgtgatagaaattcagtattttacactaatggatgacccaatccttccaggtaagcttcaacagtgttatcaagctatcaacagtgttatcgagttcagtttttctttatacttattgtgcctacagtaactttcacattagttcttcagagtaaaatagagcttcccaaaaattgggggatgtcacagcttcatctttgcaacgagagtaggaacttggtcaaccattagtgttcaggcttctggtcacaggtgtgtggattggagagcatctgctttttcacaaagagcagcttagacaatggaggcctcacgggagacaatcatgtgtaaggctttgtgtcggggctaactgaccagttcagagaaatagaagagtcatctaggaaggtttcctcaacttcccctcatcaagatatatttaatactctagattattctctgctgtttttccagaaaagaacttaatgactttcttcttcctttttcttaaattggaagcaagaaatatactacctgagcaatatgaccataccatattaggctgtgcttgttggaataaggagtgtctacctttaaaagtaaatcaatacgtggttttaaaggatgccacaagttaagcaacataaatacttacattaagcttcagtaatcatttgggatccatccgggggagaacagcacaaccaaaaacctaagtttgcctctgcaggagaagctccaaaaagctcaggctgggtctcaaacagtgattctcaactctgcacatttgattcacctggggagctgttaccattagccaggcccactcctttatgagattctaatgcgaagccagtattgagaatcactggcatagaaagaaaatggcggcctgtggaagtgggggtcaccagagaagctgggaacccctcagaaagagagtccccaacatcagcagagagtagctaattttgctcattatccaagagcctcggaccactgtgcctctggcctcctcgggtgaataaaacccatatgtccctgggtgaccaagccagtcaccacctggtggtggctccaagccaagcagcacattccctctgctggcttctccctcatcaacttcttgggctgccggatttcctcagagggagcctcaggacacaaaacgaatggggaggtcaaggcagctgtggtaataatacctcccaatattgtagccttccttaacaatcatctcccacccaaaactgcactcaggaggagacagagcagcccagtaataatgatcacattgataattaagtatctaagtatccgctatgtggcaccaagctagatgctttatatatatttttgcaaaggtatattatctctattaatggggatatcagcgctcagagtggttaacttgcccaaaaggctagaacgagcccaaatctatctggctctgtaactcatgtctttctatgccatattgccagtccttaactcttaccttctacagagtgtcattatctgatcctgaaattaaatgaagtcagcccaagaaaacacctcggggacagtggaaaggatggggccaagagattagtgactagtgtcattcatacttcaatgtgttaaccagtgagtgaggaaccaggcagagggagagatcagctgggatactctggagaaccagaatttgcatcctatcaagcactagggagggaaggggagaggagagtgaagaggggagtgagtgttcaaagcgrtcagataaggccaaggtaatttaacactataaactttgctttttccctcctaaaacctgctcctcctctctgttcctgccaaggaaaactcatttaattcttgtaagattaaccaataatcatgggaatgccaataagtcaaaggcagggaatagatttctagtttcatggctgcaacttgagaagactgatcaggaagttggtgagaaaaagaggcagagagggaaggaggagtgtggtttggggtcaaaggtgtaataagaggaaaaacaaacaaacaaacaaaaaatccaaagttaaattttactctgtgctgagattccactctttttggccctagccagaaaaacaacctttgtcccatggcagccaactggagggccagcgcctacattttaggttaagccaagaagtgaaaaacctaacttttagttcgagcgtgcaacattcccaagattgggttaaattcttccctggtctcctcttctctcatgcaaacaaggggaggtgggtgctcgtgctgacagaagttgggatttcatctctccctggagaccatatctgcacactgcttcttaggtccctcctttggcataatcaaaaggcaactgcaggaagccagtggtcagacggactttcccacaataccaagttagcaccatgtcaggtcagaagagttctctgaaagccaatacaaacagagccaggcttatttcccagagggacatccccttttctcgggcaatgtgatatccagattgtttctcagattggccgctgcccacacatccaggctggcaagccaagccctagggttgattttcaaatctccccaaatgacaagcctcctccctcagcagggactgagaatgacggtgatcttgggaatcagaaaaggggaaaccctccctgtcctctatccctctatccctgttgcgcaaagaaagagaaaactaatgcagtgtgatgtggaggtgatgcctgatgaaggtgcactggaggaaggaaggctggaatatggtgctaatcagagaggagtgtgagaattttaagaagctgatgtctgtttttatccccttggaagttagaaccttaggggcactaagtgtggcctcaatctatagggctgcccataaattcatctataaaaaggtcaagaggagagagatccaaaactgatcacgacaatgtctagcatcctttctggtctactacgtaccaggcataatttttttctttcttttatttatttatttttttttttttgagaccaagttttgctctaattgcccaggctggagtgcaatggcctgatcttggctcaccacaacctccgcctcccaggttcaagtgattctcctgcctcagcctctcgagtagctgggattacaggcatgcgccaccatgcccagctaattttttatttttagtagagatggggtttctccatgttggtcaggctggtctcaaactcccgacctcaggtgatccgcccaccttggcctcccaaagtgctgggattacaagcgtgagccaccatgtccgactgtaccaggcataatatatgatctcatttaattccccacaacaaactttaaggtgggtcttattgtttccttttcatagatgaagatactgaggtctcgagagtcttagtaattcacccacaaatgttggcactccttggggcatttgtcatcacttgcctcatttatttctattgaactcgtattgctctcagattctacttaaccaggaaacactcattagaagccctgccctgagccaaggaaaaagaaagcttgggccgattttgcttactcttgtgtccccagtgcaaatcctggtgctggcatagttgttgttaataagattttatcagaaaatgaaaatggyccatcttggctcctgcttaaaagtgaactatcttccctaagttggaattcaagaagcctgaaaaactgatgtccaagacactgtgtagtgccagattatatgagattcgtaagtgtttcataaacgatctttctctcaagagtgtttcaaagcaagactggactacactcctataccctgcccctttctagttggctggatgtatttccatgtctgtggcctctgcttataagcttttgatttgcaaaagtgtcaagtctgaagatgaagcttagccatgtgaaataaggcacttaacaattcctcattgaaaaatcacagaaatgtttttttcaaagatacattttaccctcttatctatatttatttcctcagaaaacaaaaaagaaagaaataggctgagtgtggtggctcacgcctgtaatcccagcactttgggaggttgaagcgggcagatcatgaggtcaagagatggagaacatcctggccaacatggtgaaaccccgcctctactacaaatacaaaaattacctgggcgtggtggtgtgtgcctgtagtcccagctactcagaaagctgaggcaggacaatcacttgaactgcaaggcggaggttgaagtgagccaagatggcaccactgccgtccagcctgggcaacagagtgagactccatctcaaaaaagaaagaaagaaaggaagaaatccaaagatgttcatgggattccttttcctcttttgcaggaaaggcaattcagatataccctctttaaaatagtaaaatacatgtaattttccacctttaagacaaacagttctccatttgtggagagacttctgaaaatagatgcatctgccccaatgccagagctttgacgctggtgtatctgtccgaactcacagatcagtttttcaatatattgtaggtagtctgctctccagcgtggccatgattaattctgtcagctctgaggaggaggccatttgagatcctgaacccccacctgggtacgcctcactgttgacttccatacctgcctagagcaatatgcgttggctttggcatgtgcagggccaggcattgccatcaatggagttcattgttttgcagcaggcacctgcacctgcacggcaggctcaaacaataagt

SEQ ID NO: 94037 - DNA, 124734 bp, Homo sapiens
  misc_feature (1)...(124734): n = A,T,C or G
tatcatcccaactatctgccagctgtggccagttcattttgttcctcaggatcccctcaagggccactcctgtaaccactgaatggacgtaaacattgttaatggaaaatgggactcagctgcatgccagtagtcattgttggagattattattttttatttttaataataataatttttttttgcaaagtagtatacaagactgggacttcagcacaattcacactaaagtgattgtgaacacactttttggactagagcaggagactggagagtagatatctaaccagtttgtcccttccagggcaggcccttggtttggctctgttgaagacagagagtttgtaaaactcagtcttacctttagcatcttttcaactcttggagacaggctaaaaagagaaagaaaaagcaaaaatcctagcactcattcaagaaacctagacttagagattaacttgatgtaatgcaaatgatgtgactagtttaacatttcctaatgaccaaaggcacagagcagcatctgggagttgctatgttttctccttcctcccctcagtggactgattttatttttagtgtccagggagataatacagttaaatttgttgggctaggaacaaggagagtacgggtttattaacttcccttccctccttctctcttgcccttcatccctctctccctccctttcccacctttgtctccttcctttattctttcctttaatatagccactcatttatatattgattgattcagcaagtatttattgagtgcccactacatgcagataatgtatgtgatgctgggtaaacaacgtgggaggaaaaaacttgaattgatcctactatgacataaattaaagcctcgttgtaggggagcagaaaggaggaaacagaaaagcaagcaaaaaatagaaattgcaggccaggtgcggtggttcacgcctgtaatcccagcacttttggagcctgaggcggctggatcacctgaggtcgggagttcgagaccagcctggccaacatggtgaaacctcgtctgtactaaaaatacaaaaattagctgggcacagtgacgggcgcctgtaatcccagctactcaggaggctgaggcaggagaatcactggaacgcaggaggtagaggctgcagtgagccgagattgcgccactgcactccagcctgggtgacagagtcagagcaagattctgtctaaaaaaaaaaaaaaaaaaaaaaaaaaaaaattacaaattgcaaattgtgaaaattctacaaaagtattataaagggcacatgagattaagggcttaattatataggatggttggctgagacctctctgaaaagcaaatatttaaaggagactgaaagaatgagaaatagcaagccatgggaagaccatgaggcaggaaagggctgggtgaattcaacaaaatggaaagagtcctcgtggctggtacagagtgatatagagggaaagtggtccaagatggagttggagaggaaggcaggtggtagatcacatgggcaatctgctttctgtcttagtacctcagtttccttatctgtgaaatgatttgttgggctgcattgcaaccattacctactttgttggtcatttagtattaagtgtcaatcctcttttaccatgggtttcaaaatcaaaattttctagttctttgggtgctgaagatgtcatcctaggcactaggacctaaagatctgcctagtttaggtgggaggaaactaaaatgcctaaagcaggttttatcaatcttggcactattttggaccagataatttttttcttgtggagggtggaggtaggagaatgtcctctgcattgtggggtgcttagaagcattcctgcctctgagcaccagatgccagaagttgggtgacccaaaaatatctccagacattgccaaatgtaccctgggagacaaactctcccttggttgagaaccactagtttacagggtgagactgtagctccaatgagcaggtctggcatgagatgtgagatggaacctaacatatagcctcagtgttggggaaaaaagaaagcaaggcaggaaccacagaaaagaagtgggcacctgctcatttagagggggcatatggtacttgctctggctggttcttttttctcctaagacttgaggtactcacaattagattgtccataatctttggttcgtgacacactcatattatttgcccatgttgtgttgcattaatttggttagctactttattagttctttataataatgtgctgaacccatcaccacaaacaaaagctaggactttgacaataatctgcatgtaacagtatggcctctcattcctctgcctttccccaacagaggcagccactgtactaaatcatgtgttcatcattcccttgctttccttcctatatggttttcttttatctagatatatcccccaaataattgaaatgctagcagtttttaactttataaaaaggttatgatgctattacaatcctttgcactgactttcttcacttcctattctattactaagagtcatccatattgatgtgtgttgctggagctcatacatttgaagtgctgtattaaatctcattgtgtggacacaccacagtacatctcactcactgatggcatctgggttattttctgggttatattacacatggttttttttgctctccaactgattactgcagtgcaagaatgtgggaacaatattgtcaccattttaatttattttaaggaaaaagtagaaatcttaatttttatgtgaaaataactgggggacaaatttaaagttttaagaaatacctaacaggtaaaaaagaaatgagactgtaggtcattccttttgagcctccagtttaagatttctagattaggtcattcatgttgagaatttttcacctgaatctataagtcaaattaacttggaagaaacttagaaaaatgttctttagtatttaagagtggcaaagaagaaactgtacagaggcaaggattttaataggtgtccagattggatgagcagcgaggtaaatccattgaaatgcattcatttaaaacagtcggttgtaggccgggcgtggtggctcccagcactttgggaggctgaggcgggcagatcacgaggtcaggagatgagaccatcctggccaacacggtgaaaccccgtctctactaaaaaaatacaaaaaaaattagccgggcgtggtggcgggcgcctgtagtcccagctactcgggaggctgaggcaggagaatggcgtgaacccgggaggcggagcttgcagtgagccgagatcgcgccactgtactccagcctgggcgacagagcgaaactccgtctcaaaataaaataaaataaaacaaaacagttggttgtagtgcctggaaattacagtgaagcattcgcttcacacccacctactcctgttgtcccagtgttattattaatagcaccccattcaggtgacaatttatatggttatctctccatgtaaccctttattgctctaaccttgtttaatcttagctgtttgtgtgactctcttctctactaaactaatgagctccttgagactggagatattgtcttatttatctctgcgtctagcacatgcctgccatttggtggacatgtaacaaacatttgttaaattgaactgaaataaaagaataaagaagagcataggagtagaaatggccagcccacatcatcttccatgtgctgcagaggtctagactggaggcccagttttgagttagttatgagctttgtggcttgggaaactaatttaatctttttcaactaaatgggagaatatgtatcatgtgcttagtgaaaggctattaagtgcccaataagtgttagctgctagcactgttatcaataattagttgttaataatcactattattactattaaaggtattatagtaactttgaactttagttttcttaatggggaattaagataataatttttgtttactttatgttggcaatgaacacaaagacactttggaaactgtagagagccctcactgcgtagcccaaaaaagaatgcatagtaacagagaggtttttgctatagaaccgagtaactcaggcatattacatgggggctcaactgactggcaatataaggaaacttttaaatataatattttaaaaagatgaaaaaatggctgagtcggaaggtacaaattgatctatgccaaagtgttgaaacatagaaaaagcacatgggaaagaatggtagctggactcaggacaagtaaggaaattaagactagggcactgctctgtgtgggattaagagagcattgctgccagtgtgttgaggggacagagccattctaggcttggcatctggagagcaatggcttgagcttggagcagaagagtattcatgtcagaatctacattctactttgcaaaattagttaagagattgtatttctgagttaatgagaacattttatcagttatgccaaatttggacaatgcctaagaaagccattcggcacctgtatgtgttgctaatagtagaaaggaatctaatgtttacacacaaaagcaaccttcagccaagcatcacagaacctttcctggcaatgtaatctttatcaggtgagataaagaagttgatagatttaaagttttatgttccaactcccttgttatcctaagagacaattctagcaaragcagaactgttgacactaggaattcttgtacctaactgccaataaactggtggatagaatttcaggtctatttcagagacatgtgatcaagtaatagcagcaacagccgtagtaaatgcttacatagggcaacaaccctgtcatgtgggtgctattactatcccattttatggaagacaaactgaggaataaagaggttaaataatgtactgaaaaatcacacgcccagtaagtggcagagctagtctctgaacccaaagagtcttggtctggagaatgtgcttttaaccaggacactctactacctctcaattttagctgtcataaccagtgtaaagtatacccatgactttgtgggataaagttgtgggactaagaccataaacttcagggatggttttctattctatctcaggatttccttggaaggaagacgtttgtctagattatatatttattagaggtgagactcttatcttgtcttgtatgtatcctctggggtctaataatatcctctcatgacgcattggtgctcagtagaatgagatgaagtaaaccaaatagtccctatggtgttttcctcttgacataaaattgtttgttgatgaatgaggaaggaacatgggaaggcacaactctaccccaaactcccaagggcaagctggcatttacttgttaatcctcttatggtcaaatactttcacccaatcctgactcagatttcaaggcctggttcttttctctccctctcctgtgtctgctgatcccagccaagggaatctcttggtgctgctgtcagctcgccagctgacagacctggattggaatcttagcagtgggacattctagctgtgcggccttgggcacatcatcccattctgccactctaagctcagtcccaccatgtatgaaatgaggatgattatctcacttcagggaaaacacagggataggcatgattgggagagttaaacaagacagcacatctaaacacctagcacagtgcttggcacagggtatctaggtgctcaaatgatagaaactgatttcctagttagactgtgacttccttgcttcctgggatcatgtcttacacttctttgtcaagatttcctctccactctctccatgcctcaccctgccctctcctcaccctcctcaactccttcactctgcccccatttccatcactaaaatcagtatttgttcatttattgtttattgtgcttaaccaatatttggtatcattttgattctgtcccaggagatatttggctatcggactcaaggctgccggaaaagtctctgccttgccggatccatcttctcatttggaatcctccccttggtgttttactggagaccagcatggcacgtatgggcacattgtgtcccatgttccttgcaagaagcagacactgtgttgctgaggacaacggtaagtgtgtacctggttatgtcgctggtgccccccttttgtttctggacaatgtgttacgggatggctggggggagatgtgcacaagacagatagcaggtggaggctccagtctttggttccttaggtttcatcacagccttgcatctagcaggatttcactaatttgtgtatggtcaatagcaaagacatggaacaaacctaaatgcccatcagtgatagactggataaataaaatgtggtacatgtacaccacggaatactctgcagccataataaagaacgaaatcatgtccttttcaggacatggatggagctgaagccattatccttagcaaactaacgcaggaacagaaaatcaaataccgcatgttgtcacttataagtgggagctaaatgataacacatggacacatagaagggaacaacacatacgggggtctgtcagaaggtggaggctgggaagagggagaggatcagggaaaacaattaatgggtactaagcttaatacatgggtaacaaaataatctatacaacaaacccccatgaagcaagtttactcatataacaaacctgcacatgttccccgatcttaaaatacaagttaaattaaaaattgtggatggtgaggtttgatcaagaagagcgatttcacaagatatttcttttaaagttgtgagtttcgtgaatgctagagcagggaacaaccacatgttaatagctaaaaataacaggaaatgtgaagtagtcaagtcaggctataggctactaagttcacactgaccgttcctctcgattcctgacatatcccactccctgcactggagtgactcctgaggaaaagaagggaaggggtggggagcatcactctgaggaggatgctgtctgtcccagctgattgatgagagcatgtcacattctgcagatacactagggtaaaaagtgcagccatcttgcccttgaggccattgcctctctctgttaataaaagcctctggctttgggtgagtttccctgtatttccttccataccaattccttgcagcactcatggcactcggacaatgtgcatcatccctgcgggactgtcagcttctcaaaggaagtgagcatttctaacgtgttaattgctgcacccccagttcctgcatgtggtagcgattctgttactatgtggtggctgacagkctgaagtggatgtttctattaaagagagtggaaggacagtctcctagaggactctcttctagttgacttttactgagtgtttataagaatgcatcagcccatggccccgaatgacaaccaaattgttgataaatcaaactctgttgggagtttagcttccttttatatattacaatctctctagatacatattctatttaatgcagtaagagagaaggatagcaatcagccttataactggccaaaaagaaatctaacagaggtgaggctaaactccaatgaaactgagaactggaggaagttggtctttgttgacttgctccattggggccagcctcacctttcatttctggatcttggtcccttcaagaaatacttgttctatgttctagcttagctgatatgtgagccatgatacaggtaatagctgaggcatcttctcacaagttcaactataattttactagagactcttggagaataagctttaagactttaaggaagcaagaggttattgtggaataagagcaagtgatattggtgatgttgagctggagctgtgcttcgttgatgcctcgtgtcatccttcctgaagactcacaggatgtgcacaaaagaaaagtgccyggcaccccacataagacttcttcatttgatgggtgaggaaatggggctagggaggtgacacaatttcccctagctcacgtgtgagtgaggggcctcaccaggactaagtcccatgagtcctggctcctagtcaagggcttttccattgcactgtacttagaccagggttcacacacttcaactggcatcagaataatctagagaggctatcggaacagcttgctgggtcccagtcccagagattctagttcattagatttggattgagacccaagaatttgcattttaacaggttctcaagtgatgctaatgattcttataaggggccatatttagagaaaaactgctgtaactagttttcacttccatttgtgagctcacttgttcacttggtccttgggagagaaatagagacctagacatttgatgtatggctcagatggtatatatttataatctgaaagagaagaatccagatttagtaaagtgctatgagtggccctcccatacatagcctgagtgcctttctaggacagggataaaatttgctttctggggctcagagcaggggtgtgagtatctatggaagactccatctttgggcccttttatagatcaacccctccacgcgaacttaagaatctatcagattattattttctggcatgaacgtaatttaactgtactctacaagtccatctgtatgccctcaactagttctcagagggtaacgcttttgctacagtagaaacagaaccacgctctgccttgcagggtccatcagcaagctcttcagatctcagatggtctgctcagctgagccgtgctctctgaggtgctggcagagttatggcacagacaagaataagaggaaatgggcaaggaaatggaaaaggaagggaggaaaataggtaagaggaaaatgaagagagagaaaagagaaaaaaatccactaagagtgaattaaaaaagagtgtcactaaatgaggagatgatgtgttttgggatttggagtcaaacgttttgatttcttgtcctagtactttaggtttgttacctaactttttaggacctcaatttcaccacttgtaaaatggrgcagtgtgagaatgaaggagtcaaacgttttgatttcttgtcctagtactttaggtttgttacctaactttttaggacctcaatttcaccacttgtaaaatggggctagtgtgagaatgaagggctattgtctatgtaaaaggcatttgcaaactgtaaaatgcattgtcaaacaccactttgattgtgtgtgtgtgtgtcattgctcaagccattccaaaagtgttctatacaaaagagcttgctatgcacaaggtgcacccatatctaatggtcttgcttatctggatgacgtgccttttcctaattacccacgagcctggcattcccctctgggacaacggacacgagggaaggttttctgtgactgggagtctccagctctcatccatactcagtcgggtgatctctcctagttgcgtgtagccagctttgcaaatggacatatactggaaagactcaaaacagctttggtgcccctgggagcttcgttccatcatcctgcctctttctttgcatccttgacagtctgtcaagcccttgtcgaatttcactgcccctccacagctaatcagagcagtctaagccrgcttcaatcttgcctttttcatcttgatttcaactttaatttttaattgcctgctcttgtgtgtcattttaaatggatctgctatgccagagactctccaaataaatgaagttctgaattagtctttaggtaattagacaagaactcaattatttcaaacattcttactatctgagagttagataaaaataagctttgggcaccaatagtttaaaagtttgctgctaggttatttgcattaaaatgacatcttaaaaagattttatttgaattatattacaatagctggactgtgatgattttccattaaggaggtctggatgactcctacctgaaaatgtgttgtatatctgttcttcatgttattaaaaaatcagtacttgctatttatcatcaatctcacgctggtaagattacagatcattatcacagatactgattaggcagtcatttcttgacattaaaaaaaaagacggtgatgtactgactgaaagtctacagtacacagtttattttcagttcttcttctcttattaaggactctgagagatttttccaaaagataagagtaattaggtttttattttataattttaaaagcrgcattctgttcattattcatctacttctgatttttaaccaatatcagtagcaatgccacgtttctatgcaaatgacatgatttatatgcattgttttgaattcagatgctcctgattttcatagcttccatctttattgtaattacaaacacattttccccctcattgtcatcgtaggttacatgttgtcaaagacccgtggtgtgcagaggagaactttgtgatgattagcaatgcggcctgactcaaggcacttccgtttgatgttttaatggggagtattttcgcttcagtttcaattaaagatgtcagggctaggagcgttagttcaaaaacttagaaactctgccaatcagccacgcgaatgtcatcttaaagtctgccagtgtaccagtattctcgtcaggcggcagcatctgtgttcactgggtcgcttacctcctctcctccccgctcctcctctgcaacttggtctctcacagcccacgtttcccacaccaggaccactttctactggaacaagacactgttttgtgcctgcttttacccataaagtttcttctgataattccttctcccctccattcatgcatgcattcattcacttatgttttcagtgagttagtatttaccacacaccaaccatgtaccagacattggcataggcactgggaatataactatgagcaaaacagatggaaatccttgtccttacagagtgattttctagtgaggagtcaacacacacacatgctttctctttctcaagtaaatgtagaaagtaggtgttgtctctacttattaaattctcctcattcctcagccacatatcacctyctctgttaagtctttgttgattcattctttgcgccagttcagaagggagggagttaattgcctgtcctgcattagctctgtgttttcatttgtgaccgctgtagtgctttttaccgtgtattaaaatactattcactttacagtttataaagcagtatgtcattgattatttaattctcataacaaccctggaaaatgggcattatcatctccattttacagatgaggatacaaagagaccaagtgactttacaacccagtaaatatcaaagccaggctttccttccttatatctctctcttttttatacatttgaggagcacacattgtatgccagccaacagtgctggctcatgggcaagtgtgtaagtgtgtgtgattaataaaaccagggttcttgacctcatggagttaatcagatcggtacacaaataaatgtaaaaatccacctcttaaaagtactccttaggaaaggctccaggttatggtaggattacataatagagatttggccaagtcaaaacagtcagggaaggctttctgagcaccaaaggataagagttaaaaggtgatggtggctgctgggggcaggcacatggagagtgatgcaggtggagggaatatgggggcaaagaacttaaacctaagactttctctaagtcccgaatcttttttttctcactgtgctggattcctttttgtagcttttgatcctttaaaattataagctttctattcctggaacttctcagctttttttttttttcctggacagtctagattataagctttttgaagacagtgattgtggtatacatttcattccccctggcacctagcacatggccacagcaggacttagttatttaatttaatttaatacgttgaattaagttgaatctataataaatagtctcactgtttctaccagaattttatctcaaggatactaaagtggaatgtcacagttgagaaagagaatatagcattatgtttctttcaggtacacattcccacttctgaatcctgctttcctacccactccccaactcagtcccatttcaacctggtctttcattagacatctcaccacaaatctctgagattctgtgagctggcctctgagaaatgactcaatgttaagataaatcgttttgagactattatcctttataatacagggccatttatattacgatttaacaatttacatatagttgtctcatttggtccttaccagtagagatttttttctccagttttacagatggaggcatagagaaattaaacaaaattctcagggtcccatagccggaagatgagagttgaactagagttggaactagagatctaattattctctgtccagtgaccagattctacagaggcagcattgtgaagtggtttaagaataaactctaggttctgagtacctggatttgattcccagcactgctcttgaccttgggcagtgtatttgcctgctaggcttctatagcaaaataccacacaccaggttttgctgaaataacagaaatttattgtttcatagttctgggagccgaaagtccaagatctagggccaggagagttggtttctggtgaggcctctcttcctggcttgaagaaggctgtcttctcactgtgtcttcatggggtcttttctctgtgctcttgcacacctggtgtctcttcatctcatatggacattagtccttttggattagtgtgtacccttatggcctcattcaacattaattaccttcttaaaggctttatctccaaatatgttggaggtgaggggttcaacatgagaattttgaggggacacaactcaattcataacaggcaggttatttaacctctttttgcctccattttttttctgttaacyggggctgatgataatacctatctccttgtgagaactaaggatgtgatatgtgtaaagttctgaaataaagactgcttggcatgcaggcattccatgggcattagtcaactttttactacacactatatmtccagaagtttcagacgatgacccgctaatccactgctccatttcccctcagaaaacagctacaaaaatgagcaagccccaaatcccatccctccaaaaaaatgtatgctgagtttgctagatttccttgttttgtacacaaacataaacatagcctttgctttgttaataacctcatkgtgttgtccctccctcctctttttttttggacaacatatactgagataataattattgtgagaatttctccaaaacttagaactttatgtatattataactaaatcctatattctagccaatgtcaacttttttccaactaaaagacattgggaatatgaggtcgggatgttaagagcatcaatgagtctggccaggagagggaaagagaaagaaaaaaaatgatagctgtaaaaataaaagaattttaccaaagttatgggtctataaaggcagtgcagcattttagaatagcctgagaaatttattattacattatccataatcctctaggtatttcacatgagctagagttcagccttttagcattgcaatgtatccatctccaggagaaaattactcactttctaatgtctcattggaactttgaaatgggttctttttaaggcaagccagaactacatttttttgtgtagtgaactatacaagagaggtcacagcattggcctgaacttgaagcaaccattatattgcttttaaatttcaagggatgaggttcttattgtaaaaggatagaattaggttaagcaagatgtgttagtctgttctcacgctgctaataaagacatacccaaaactgggtaatttataaaggaaagaggtttaattgactcacagttcagcatgtctggggaggcctcaggaaacttacaatcatggtggaaggggaagcaaacacatccttcttcacatgctggcagcgaggagaagtgccaagcaaaagggtgaaagccccttataaagccatcagakctcgtgataacttactcactatcatgagaacagcatgagtgtaactgcccccatgattaaattaccccccactgggtccctcccatgacatgaggggattatgggaactacaattcaagaggagwtttggatggggacaccgccaaaccatatcacgagatagcttgcttcattcaagtctaaaagtttatctggcatttccagggtcagaaagtacaaaaccacaggaaataaaaaatgtccaggtttctccctctgtttttcagtccaggtcaaacactggtcctttgtatacattcgacttttgaaatgcactcttgaatttttgtaaaacctatttttttagagttcaaggactgatccggttaatatttttgataaagaggaggtaaagccttctcaatgagacctgaggtgtaaaaagtccagatttgccaggcaagcactttgcattatttgcattataaaccaattatttaaaatggtagctcctctggtacatttaagtattttacaaatcattacctgctttgaagagagctgggaaacagactaaagtagaagaagccatttacaggcaaagatgctgcttttccaaaaaggaaaaattgagagacttttagagtttcctcaaagggagaataagttcctacttacagaaagaactcagaaacaacatgctatgaaaaatgaggcacagagccataccatttgttgcctccctgctatgggccaaaccttagatcagacacattatgtatacttcatttaatccttcaaacatccatgaaatttggtattacttccattttctaaataaagaaaattagcttcagacagttgtaagacagtttagagctgggatttgagttcaggcctcaagcctgtgctcttgccatattggacaaccccaaaatgaaaactgagaagtcaatgattttgcctgaagtgaccacttcacactggtgtactttccttccatttctttgctttttttccttaaaaagctgggtgatttgacagagtcctcaacagggtagtatacaagagagaagtcagtgtcactcccctactctaagcaaaagggtcatctagctgtcctatcttttattttttctactttgtatcatacagaattatgtatgatacataattagtagaattattttattctactttgtatcatacagaattatgagtattgggattgggagtaaatggggatgttaggaaatgagcttaaaggcaaatatatccaagtacctttgatttgrtaatattatgagctataagaagagataggtgtatagatgaatgtcagtttttaatacacacctagactaaggcatacagttagttggtgcactggattaatatggcctttgagaacctggacactttgcttttccctctttaggcattacagtctggaggtctgtctgctgtcacacagggccagagggtgacagcttgatttcaggaattagattctatgctgtcaggagagcagagattgtgagaaactggatactatttgtcagttggtacagaattcaaggtgatttttacatgcaagccatagacaccatgggacaacttgttgaaataaagaggaagggaccaagatttggaatggaaagatctggactcaggtctcagttttattcctactaccagtttcagactggcttgagcaattcttagccttgctggtggttagttttctcatctgcaaaatggagataattataataccaacactggagaattgtaagcctaaaataagataacataacaaaatttctacaaactgctatgtaatcatatgaaaattatgaaactgctaggtaaacatatgaaagttgttaatattattttaattcactggagacgattaatagttgctgtcttcctaattgtccctacttggtggcaagaggtctctggtcttgatggctcttttataatttgtgttcctatttacctacaaattatacattttcttaccaaatttttcattgaaactatgttttttagaagttccagttcaggctcgacataaaaatggcagtccaatcaaattatattttttagcaaaatgtagaataaagtggaaggttagaggggactctggaggaggcaagcaggagtggggaggtgactgttaagtgcctgctctaatagttaccaagtatgtctttctttccttgccaactaaatgggagaataattaactgtaacaattccatagtgtttttgacattaaatgaaataatacatatgtagcattatgtgcttagaacataataagtgtgaaataaatattaactgttattagaaatggaaagttcttacttaaaaactgctttgataaagtcaaaagcaaagctatataatgctgaactgtgtcaaggtttgttcaagagagttggttgcctactctaccatacctagaccatgtctatcatcagatcggtgacttagtcattgaaaatttagctcccttccaccattcttaggctcatcattcttaactccatacaatttgatttgaattgatttagtcacctttttttttaaatccacagtgtaacagccaattacattggcttttaaaattgattaattaattaatattccaatttctattaaggttattttcccctcttgttggcttccttcccttcttcatctctctttctctctctctctctctctctcacacacacacacacacacacacacatgcacacagaacctgtgctaagcctggctgaagtgcagacatgcatcatacacaattcctacccatagtccaagagaagtggtaaggtggataggcaaagggtaaaatgtggtaggaatcttgagtatcctgatgatttagaggagagatcacccagagtaattagggaggttctcaggacataaactctgagctggaccctgaaggatggtagaatccagccatgtaaagacttaaggagaagagagaagaatgtgtactacaggctaaggaagcagcaggagcaaaggcatacagacggtcttctcttaggaggatgaatataagagattagctacaatgattgtatcttcccctctctgccttttgcagagtcagctagggcactcttcatagcaaaaatgggtgtggtggtggagacaatttccagctctgacctacatttcccaagcatcaaatttttcccacgtttgactttttctgttatacttcttgaatcctgaggtttgtcagtcatctgagtgggttttatgtttagtatttccctattcagayaataaccactgtcaaataggtctctaagggaccattgtggtatctgtttctcaatcctgtgcttctccctctaattttactctgtgtgaagtaatcagtgaactgcaaatggaagcaattttaattagggtcatgcaataaggtgccttcttcaaccccacctgtgctaacatcttggcaattaccttgggcaggttcagtccatggattcagtttttttcttccattcttcagactctgactgagcaggtctcagtgctccacatgaatgggagataaggaacaataaaacgtgatccctrcattccaggtagtctagaaggactagaaaaagtgattaagagcacaagagagggacacttaacatttttttggagttaacaaagtgatagttcccccccctgccccgccccggtggaagggtgttaatgaggctgttctgtaggaggtggaatttgagttaagccttgaaagatggggatggtcatcaggtcatgggctgaaaggtggttgaaaggtgatgcagtgaactagttcttacctgcgaatgagcctcctgattctcaagctttgttatgtgtcmgtgcctcatcttcatatccagattcctcagtcagtgatgacaggtctttttccctcaaggttctagatccatcatctttcagagacaaaccgttctgtctagaatattcactaacgccaaacacttacagaattatattaaaatgatgtttctcaggttgaattgtagcctgctgacctctcttaamttcttgggggttttgatgtctatctcctcaggatgaattccaaatttactcttggaaaaaggtaatatggatctacctgtcagcattaaacagcgcatttggtctcactcctgaccaccctctcatgacagatgaggagtatatcataaatagagccataagaaagccagacctaaaggtaagtaaacttatggctactgctgatgtcagagagatttaatcttttycccctcaagtatawagttaaatgtagctcctctactgtgccaatcctcatttgatagtgtatatttaaaatgtgaactttggagccagacagtccaaatctcagcttgctccttctaaatagcgcaaccattgatcttaactctgctgagcctgttttctcatctacaaaatgatgataataatgtctatttctaatattaattgataaaattcaataaatttagaaatacaaagattaaagtagttccaggtatatagcagatgctcaatacatactcgctctattttcttttccttttgttagaggtaggatctcactatgttgcccaggctggagtgcagtggctattcacaggtgcatgattataatacactacagcctcaaactcctgggctcaagtgatcctcctgcctcagcctccctagtagctgggattgcaggcatgtaccgcccagcccagctcttacatattagctctaatagtatcgttccccatattacaatctatgtaacagggttaatcttatagtaaaagtaatcacccaggaatatcccaggaggtttgcttatgcctacaaaaatgaccttatttgaattcttgtcattcaaatgtatttgggttgctccctcttcaccctattaaattagttctgcttggattatgactagttaacattcatattaaaaacattttataagacagaatgttttgtcttacatttatgtatgtgtggtcagctgtttaaattagttttatgagctcaagttcagttatttaaagtaataaagtaaattatgagcaattttcctattgtcaattgttatcacccagttgtctttttttttttttttttaaatggagtttcactcttgttgcccagggtggagtgcaatggcgctgtcttggctcactgcaacctccacctcccgggttcaagcaattctcctgcctcagcctccaaagtagctgggaatacaggcacctgctaccacacccagctaatttttgtgttttcagtagagacggaatttcaccatgttggccaggctggtcttgaactcctgacctcaggtgatccaccaacctcagcctcccaaagtgctgggattataggggtgtgccactgcaccccacccactcagctgtcttagctgcccaaataaacaaaaacaaaggaggtcaagtacctccaaataatagtttccctaatctgttagatgtccattcacctggagaaataagcttcccagatagcctatgttctcatagttttattgctctgaaattctagcatctttagtagcatcaaataaataagtggacagataaatgaagaaatggccaagtcaacacacagaattgtaggaggggcagaggtcttgaaatggaaagttgtgataggtgtactatcttcatttaccagctacggcataggcagtttggttagttactgcctctctggtcttgagtttcttatttataaaataaaagtaataccccttctttgcctttctcagggctgttatgaacacacaatgagacgatggatattaaggtcatttgtgaacttcaatgagctatgctagtaacaaaactttccttaaagtcagaggagctgtcatgggctcagccttgatgacaataacagcattaccaagagggtaaccatttaggggcatttaaaggaggggtccccaatccccaggccacygattggtgccctgtccatggcctgttaggaaccaggccacacagcaggaggtgagctgctggcaagccggcgagcattacctcctgagttctgcctcctgtcaggtcagcagcagcatgagattctcataggagtgaaatccttaatattgtgaactgcgcatgtgagggatctaggttacggtgctccttatgagaatctaatgattgcctgatgatccgaaaccatcaccgcatccccaagattcgtgaaaaaattctcttccacaaaaccggtccttggtgccaaaaaaggttggagatcgctggtttaaaggaagtctgaagactacagcaaagaactatgtcaggtttggaaacaggctaagaggagatgctaaggaccatcttgcaggattacaggcaaagctaacacccagtgcttaacttgttaaacaggatgctcttataacatgttctaacaagaaattacaagcagaaagcccggggagaggaaatcttccttattcctgagcagaaagatgaaattcaccccgcagcagatacttggtttcctaattgctgtttcctggtctgaatttccaggaaataggcaaataaacctcatctcttgcaaatattgtacttaacatcctcttaccagcttccagaggctctgagagtgatgggggaagcagataaactcctggcagagatgttttctcctgcgggaatctcaaatatgctcaaaaggtctaggatggagccattcttctcactctgtgagaaatggcttaagaaattgtcagaagataatggaattttctattttctggcctgaggtaaaacttatcagtagcctctttatttctcattattgctgcgttcatctacagatgtttcatgtctattatgttttatacatttttcaacctcagtgtgtggtttctgcctcttgataagaggttctcgaactgatcaggggcctcacattggaaccacaatttgtcctttaaaatatttctaacacagatttttgcatttatataattaataagtagatagccatcactttatacagcttgaatcctgaagtcaatggattttcagattttcctttgggactagcttgaatatgatatcctttgagagattgaactctggagccagatgggctggagttcaaattcctgggaagttacttaagcaaaatgaacttcaggcgcaaagtgaagaggaaaataatatctgccctaccacaggatgatggaaaagactaaacataacgtgtgaaaagtcctaacatgcccaaaaaatagtagctgtgattacaatcctgctctatttgcaaaattgcaaagaatactgaagagaaaagtaaattgtgaggcaagatgcttgagatttcaacatgtgtcatgatggctaacacaccctagagcctgtcatttacaaatatttcctttgcagattgtgaaatctgcaaattagagagagattgtgtgtcattcctactggaaattcactctaaatcggcaataagatatactttttaaatgcattatgtttcaatcaaccttgctgaaataaatccattctgtaaaataaaaaaatacagcattttacatgctatttggtaactttgaatgtctgtgtgtgtgtttgcacacgtgcacatgtgtacctgtacatacacctattgcatagagttagcattcatttttggtaacctagaccttagagctaagggatttaaactgcatttctagttgacacggttttacaaagctttcattcatttatttaataaaaaaatgtattgagcacttattttgtgccagctatatggtctttccagttttaaaatgtatctaatggttataatgactataatattcttgcacatagaatacctagagagaagctgaggtagaatatagacataatctgtccaattgtctaaatttattcatggggaaactgaagcacaggaaaatttagttgaagttctcaaataggaatctagcagagtagctacaaaaggaagctctagacactgttggctgcacattaaaattatgtgaggaaaattataaatattatgcccagaatgcactgcagacaaattaaatcagaatccttaagggtggggccagacagcagtctttttcaaagctccccagatgattccaatgagcagcctgagagtataataaccattgctctgtgacaatatggcagtctcgctgtttctttttgtgttcagttaggtcatcagttcacggaaattcacattcacatatgaacttgcttaaagaatcagaagcaagaacacacaattgtcataagcgtcaacccttcccttttctcccactgccaacagtctcagaccctcacttccttttttttttgtaataacctcctctttgttctttagtatttgctgccagcctaatctttttcagtattttagtatctttttctttttcttttttttactggtttaatctggctaccaggatttttaaaattttgtttttaattgacaaataataattgtacatatttatggggtacagtgtgatattttgatacatgtatacattatgtataaatcaaattcgtatatttgcatatctgtcacctcataggtttatcacttctttgtagtgataatattcaaaatcctytcttctagctattttggaatatacaatacaatattattaaacatagtcaccctgctctgcaaaagaacaacagaatttattccttctatctaactataactttgtactgttgaccaatcttcctctatccctttgtctatgctattccccccaacctcggatagccaatattgtactccctacttctatgacatcagcttttttagatttcacaaatgagtaagatcctacagtatttgccttattgtgtcttgtttatttcatttcacatctcttcaaagttcatccacattgtcaaaattgacagaatttccttctttttagggccaaataacattccacaaagaaaatgtacatgtacattttctttatccattcatccattgatagacccttaggttaattccatatcttggttattgtgaatagtactgcaataaacacgagagtgcagatatttatttgacatactgatttcttttcctttagatatatacttattattggaattgtgggatcatatgatagtttatttttaattttataaggaacctgtatactgtttttcataatggctgtactaatttatagtctcactaacagtgtacaagagtttcatctctttatatccttgctagcatttgtcatttttttgtcttttgataatagcattctaactggagtgaggtgatagctcactgtggttttgacgtgcatttccctgatgattagtgatgttgagcatgttttcatttatctgtgagccatttgtgtgtcttcttttgaaaaatgtctgtttaggtcttttgcccattttctatcaaatagttgttttgttgctcttgagttttttgagttccttatgtattctggatattaaccccttgtcagatgcacagttcgcaaatattttcttccattctgtaggttgtcttttcacttggttagttatttcctttgctgtatagaaacttttagcttgatgtaatttcatttgcctatttttgttttggggtagcttgcactttttgggtcttatccaaaaaatccttgcccagaccaatgtcatgaaacgtttcccctatattttcttttagtagttttatcatttcccatcttccatttaagtctttcatctatttcaagttgagttttgtgtatggtaagatacaggggtctagcttaattcttctgcatgtggattgccaggtttctcagttttatttatttatttatttatttatttatttatttatttatttatgtattttgagacagagtcgtgccctgtctcccaggctggggtgcagtggcacgatctcggcttactgcaacctcggcctcccaggtccaagcgattctcctacctcagcctcctgagcagctgggattacaggcacccaccaccatgcccagctaacttttgtacttttagtagagacatggttttgctatgttggccaggctggtctcaaactcctgacctcaagtgatccatctgtctcagtgtcccaaagtgctgggattacaggcatgagccactatgcctcagggcctatcttagcattgtttattaaggagactatcctttatccattgtgtgttcttggcgcctttgttgaaaactagttggctgcaagtgtgtgaattcgtttctgttttctctatgtggttccattggtctatatgtctatttctctgccagcaccatgctgttttagttactatcgctttgtagtgaaatttgaagtcagatagtatgatgcctttagctttgctctttttgctctatttgctttgggtatccagggtcttttgtggtttcatacaaattttaggattgttttttctattcctgtgaagaatatcactggtattttgatagaaattgaattgaatctgtacattgcttttgatagcatgggcattgttaataagattagttctttcaatccatgagaatggaatatcttttcaattatttttgtcttcttcaatttcttgcaataatgttttgtagatttcagtgtagagatttttcaagaccttggttaaatttattcctatgtattttattatttttttgtagccattgccaatgggatagcttcttgatttctttttcagatagtttgctattagtgtatagaaatgctgctgatttttatacattgattttgtattctgtaactctactgaatttgtttattagttttttttagtggaggctttaggacgttctatatatgatatcatgtaatctgcaaaaaggggcaatttaagttcttttccaattttgatgccttttacttctttctcttgcctaattgctctggctaggacttcccgtagtatgttgaataaaaatgatgaaaacaggcattcctgtcttgttctaggtcttagaggaaaaactttcaatattttccaattttgtatgatattagctgttgatttgcatggcttttattgtgttgagatgtgttccttctatatctattttgttgagtttttaacatgaaaggrtgttgaattttgtcaaatgcttttctgtatttgttcaaatgatcatatggtgtttgtgtgtcattctgttaatgtgatattttatgtttattcatttgcatatgttgaatcatccttgtatcctgggatgaattccacttgatcatggtgaatgatctttttaatgtgctgttaactttaattttgttgacaatttttgcttctaggtttgtcaggaatattgacatatgattttcttttttgttgtgcccttgtctagttttgttatcagggtgatgcatatcacctgatgcatattaatttggaaatattttcctctcttcaattttctggaatagtctgagtagaattggtattcttctttcaatgtttagtagaattcagcagtgaagccatcaggtactgagcttttctttgatgcaagactttttatcactgattcaatctcattgctaattcatctgttcacattttgtatttcttcatgattcaatcttggtagcttacatgtgtccaggaatttttccatttcttctagatttatcaaacttgttggcatataattgtttataataatctcctagggtctttttcaattcctttgttatcattcgtaatgtctcttttttcatttctgactttatttgagtctaccctttttttctttagtctgactaaacatttgttaattttgtctatcttttaaaaaatccagctctttgggttttttgaccttttgttgtctcgttttatttacctgtgttctgatctttattatttccttctttctattaattttggatttagtttgttctcattttccctgaggtgcaatgttagattgtgtatttgagatcattcttttttgtatataggtgtttactgctatacattgacctcttagaactgctttttctgtatcccataggtttttggtaagctgtgttttcattttcacttgtctcaagaaattttgaatgtctcttttaatttctttgttgaccaattggttgttcaggagcatgttgtttaatttgtatgtatttgcagagtttccaaagtttttcttgcttccttagtgatttctacttttatactattatagtcagaaaaaaatacttgatatgattttaaaatttgttaagacttttttgtgacctaatgtataatctattctggagactgttccatgagcagttgagaagaatgtatattctgcagctgttgaatggaatgttctgtaagtgtctattaggtccatttggtctagagtgtagtttagatttgatatttcttcgttaattttctgtctgaatgatttgttctttgctgtgagtgaggtgttgaaattttttactatcattgtatttcagtccatttctccctttggttttattaatatttgctttatatatttaggtgctccaatgttgggtgcatacacatgagtgttaatctcttactgagttgactcctttgtcattatgcaatgatcttttttgtytytttttatagttttcatttaaagtgtatcttatctgatataactatttctactcttttctggtttccattttcatggaatgtcttcttccattctttcattttcagtctctgtatgttattactagttaaatgattctttggaggtagcatatagttggctctttttatgttagaaaggaaaatgactgggcactgcttttcattaaaaagaaaaccttaccgaggacttatgtagcctcattatctgcccaagtaatttcttcttaactcctgtatcaatactttggtttcagtttacctttctagcttcattcttcattctacaaacaggcgtgctcacttgccttcttcccccaaactaacttgtgaacaatctctttaaaatactttctattttctcatctgagtataagtcttccaatccttcgacactgtaactcatacatcatctccatcatgatgccttccatcatcttctctctctttacgtctacagcatttcaagaccgtattttttatgttattatgtttttattttttggcatggtacatattggactgtatgccttgtttttggaattttttcctccttagtttataaagtagtagaatgcagagactaagttttattcatatatatttttctatatagtaggtccatgatacatgttgattgaatgatgacttctaataaagaataccatttgtatggtagaaaagcaaagggtraattagaaaaggataaaatcttaaataagtatgttagagttttatctttgcttttcaaacaaatgcttctttagccmctgggttgctgtttattctctgatcctcaaactagaggttttcttagtacttttcttttgcaggtgagatgcatcaaagtgcagaaaataagatatgtttggaactacttagaaggacagttccagaaaattgggtaagttgttttagcaagtacagccaaagaagaaaaatgttatctcaaaaatattattgctaaatatgttcttttcattattattattttagttctttggaagactggctyagttctgccaagatacatcaaaaatttggatcaggcttgacaagagaagaacaggagattaggtaccatgcatattattgcctatactagctcaaaaggattattatcagttagccaaatagacagctagtaaatagttatcttaatggattaatatcagaaaatattataatgctctatttagtattattaaattaaatctttcacatacattatattacatcatcttcacagcaaccttatggggcaggtagaacagacattatcaccatttccacacaacaaatgagaaatctgaggctcagaggggtttcatggccggaacgaggtcacacagatgggaattagtagcggaagaactgagtcccacactcctgactgcagatgtaatgctctttctactccatacaaagtttctcaaggttattataatataaagttgagccattttaggttaaaatcaagaaatacatattagaccatgataacgcagttaaataataaccatggagcagcagcagaacaccatgcaagatgtgtagctccacatttccaaatcagttattaggcagaggagagaggtttagggagggcactggtatgtcaagagtctgtgggctttgaacaaataccttttcctctctggacctttgtttcccaatcatagacatgggtagaaggactctttaaaggccttgctgttctaagtttctatgattcacatgcttcccccttccccatttctagtactttgaagagatgtacagcctagcagaatcagcatcacctgggagcttgttagaaatgaaggatctcagaccacttttcatcccattgaatcagaatcttcattttaacaatatcaccacatgatctatataaacattaaagtttgagaagcactgctctcatacatttgaccaagctatttaatctgagcatcgaggtggaagacacagagaaagcggttagtgttttcaacagtaacataactcataaaatgtctttcctctgcataatcaaagaaacacatctctgggttttagagacactgaatcaaaaagctgaataattatgtgtgtagagctatttttgagatyacagagcctttccactcacattaaaatacattctgaagttttccagaacttctaaataggggtaggaaagtagaaacagcatttccttatcaataaaagtaatttctcttaactacctcactgtcttacagtaataaaaccggaattgaggagagacagagttgggaacatgccaatcctgaaagtacttgaatgagacaatatttaatattaaatacccaaaataccatttaggaaaatatttagaccttggaaagagtatgcttctagaagcaatatggtcatatttatcgtttttgcaactgggaaccctcacctcccattattttgagaaggatcagaatggtatttaacaagggagacttatgttggtctcacaagtgagaaagtgaacatggaatagacctttttctgaataggtgaggagtcagttttaattttattatttgtgacagagtgatctgtgatttctttctataggaggttaatrtgtgggcctaatactatcgatgttgaagttacaccaatttggaaactgctcatcaaggaggtaatttctccagcattttctcttggtgttggacagaaaataaggaagtttggctctagtgaaataatcaggagtgctaattgttaataagtaacttcayatagagtatattttgaaagtatgccaagcatattatcctcatatctcttgcttactctttttcttcaagtggttcttttgcacattgccttatgcaatatagggtgtgaaactcattgtacttatttaccatttaatggctggatgaatataatgtttcttttcttttttaatactatgctgcttaacttgttttaacttcatgaaactcaattttttttaagctaatccttttgttaggtaacagatacaatttccttggtgcctaaaattgtaggaagaaaaaaaccatttattcagccttctcagtactgctgatctcaaggtataagatgaaattttccttttggaccccatcactgagctcatcattgtttcactttacagcgattattatcaaaccgtagccctctagctgtcctctggcttccctgtgctctctctcgactcctccttgccttaaaacaagcttactaaacttcaggtactttcaaaatatttccaacaagccgtcaagcatgaaagaaagtaaaacaaaccaatagggaatgtttctgtgtgctgcctttctaaccagaagaaaggtttgccattcctgttttagagagagggaaaccagctagggggaatttaagtaaaggcacagcatgtttttgaccaaagcagaattaaagctgttgaagttcacagctactctctcgcacagtgttctagatgctctattacagcttactgctttcagcacagctctctacttatgagaacatgcagtcttcaactcacccattaatcaagttccttaatgacttcaaatatggcaggtgttatatcatagagaagaagagactagaaagtattttaactttataaacctgaactaatacttcacctttctgaaggccagtaaatgtagacaggaggtgacaacatctactccttaaataactattgtgatggccgacatgtcaatacatgagacactactttgtaaattataaagtgaggcagtgattaaaagtaagtgctctggggtcagattgcctgtgtttaagtcttgggtctgtggcaatcatagtcgcatgactttggacgtatttctcaagctctaagtttcagtttctttatcattacaaaggagataagtaacaacttctggttaataaggtaactgtgggaattcaatgagaaaattcaagtaaagttgcttagagcggtgtctggcacgtgtcaattgccgaataaatataataagaatattgtgtgggatgatgtatgtcatgaagatgattatgaaaacaagtaaatgaagagcagagtgaagyctaaaactctcccttgtcttcckgtttttatgtctgccaacaggttctaaatccattttatatatttcaactcttcagtgtctgtttgtggtttagtgaagactataaggaatatgcttttgccatcataatcatgtccataatttccatatctttgacagtatatgatctcagagaggtgagtttttctattaattctatggtttcataaagggaaggataatgactttattaaaaatttgttagaaaggagaatcaggaaatagtcacttcctactccgtagtaaatgagagcaagtttgtaaatacctagcacrgtaaccagtgttcaacaatttagtcctttccctttcctcccattccaatccctaacctttgtagttatttttcctccctctttaatttactcaagactaattagccagaacaacatccaaaggtttatgaattgtgaatatgtgaaaaaatttatgtagagaatactgatgggacttgaggatggtggcagagagctggaaggtggaggagtctatttaatatgaactcctttgctgtttatgtttggctggtactcatttgtcaaggccccagtccaactcctgactttctttatgcctacaccaggtttctagatactgttggaaaaaaaaaattacatagaacagattggttggttgcactataaatccgtgaatgccaacctcatccggacaaggcttctgttcatctctaatcaaggtgctcttctgttctctgaaattaaggtttcaagccatctctgtcctctggtgtctgagacgcccatcttctcatattccactctttctttaattcagcagatatcactatttcacaaaaaaagatggaagccataagacagaaaattgcccaactccccactttccgagtgccaaatgactcatctccgcagccccctccttccctgaactctcattccagtgaaggaagtgcccttcgccagtgcttgagagaccatccactcccaccttcctggggtgcttgtgcagtccatgaatgactcctctcttctctcctcaagagccttcccatcaacttttaacattctcaagttctcccaacttaaaaacaaaactcaaacaaacaaaacaatttcttctcttgaccgtgcttctgccttcagctactactatatcactcttcttccattcacagtaaaacttctagagtctttgtgtctgttatcattacttactcatcttcctcttacttttcactcatgccgacatgtcttcctccctcatgactccatttaaacaaatcttgttaaggttgccactgtgatcccaaagcccatagatcattttaaaatttaaaaagttcttttaaaattagctgtttttttccttaacagaaagggcaatatatggctatgataaaaataaaattcaaacygaacaaaagagtgtgaataaaaattaaggctccctcccgctgggaaaacttcccagtgttcaggtcctgtttcaagatacatccactaggaccatattttctgtatacttttagttatattaaatgcatatgcattaatttgtttaacagaatgaatatattctatgtgtactgttctgcacttgaattttatttatttatttatttttgagatggagttttgcttttgtcacccagactggagtgcaatggtgtgatcttggctcactgcaacctctgcctcctaggttcaagcaattctcctgcctcagccgcctaagtagctgggattacaggcatgtgccaccacacccggctaatttttgtatttttagtcgagacggtgtttcaccatgttggtctggatggtgttgatctcctgacctccagtgatccacccacctcagcctcccaaagtgctgggattacaggcgtgagccaccgtgcccagcctccacttgaacttgaacctattatatcctaaatatctttctgcatctgcacaaatacattttctctagatgtaccgtaatttttaaccagtccaatgttgatatgtatttggttgtttctagtcttttgctactaagacaatgctgcaagaacatccttgcacatatatcttttcatgcatctatatatacatatacatatgcacacatattacatacctatacatatgtatataacaagtatgtatgcttataaatatctgtattgatatagagatagaaaatttctgcaattgaaattacctagtcataagctaggcacactattttaaacatattgtcaaaatgcctctttaaaaagtaatactggccaggtgtggaggctcacacctgtaatcccagaattttgggaggctgaagtggcaggatagcttagacccagcagttcaaaccagcctgagcaacatagtgagacctcgtctctctatgtatataaaaaagtaataccagtttacattccttacaacagtagataagtgtttttcttatctttgccaatataagtgaaaatagaattcagtaactctaatcacgttttccattacgagttgagcatttcttcacactttaagccatttgcatttctttgactgggaactgtttgagtcctttattaatttttattaggtcttggtgttttgcttactaatgttatggtccccctgcagtggatatttttttttccccagtaccgatatcgctaaacctctcagttggatttgacacggttaactgctccattctttctgaagcactcttttccctggcttcagggacaacacactctccatcctctccagttgctcttttccgttctcttttgatagctcatccttctctatctgacttttaaaaaatgagtgttccaaagtcaaaacaacatgaaaatgcatttaatgtaaaggctccatttttctctcccactccacttggccgactgcttacattagtttcttgtgtaatcttccaaaaaagtttttaggcaaatgaagcaaatatatgtactttctttttttcttatgtaagtggtagcataattacattattttctaacttgctatttaaaaaattactattaatatatcttgaggatcttttcatgtaagtgcataaaagattcttcattatttttatagctgtacatgccaatgacttctaaaggcatatgctaatagctttcaaatttgtatatgtatctcaaatccagatacctcttttcagttgcagactcatagcttcaacaacctatttgatatccccaccttaatatcaaaaaattaccttaaattcaacacttttgacataaaactcaagaactcttctcctcaaatctgcacttaggtttatctgatgtggtagcagatactgctgaccattctgttgcacaagccagaaatctggttgccaaccttgaaactttctctcttcttccccttcaactacacagaaagtcctttgatttttatttcctaaatatcccctggcatccttcactgttttccaccctaccactattacggttcaagttagcataattttctaccttgcaatcacctcccatctggcctccatacatcattcttgcagaatatgattatttacatgcttttatcactaaaatgcttcaaaatattcccattggtcttacaataaacttctaaatctcatcgcagactttaaagctttccctggaggttcacaaactttttagtttctagagctctttaaactcttaaaaatcactgaggatctctaagagtttttaatcttttaaacatttggtatttaccaaattaagaattaaaactcagaatcataaaatatttattaattaatttaaaataataataacatatttatatatacatatatatttaaagacaactgtattttctgaaataaaaataatttagcaggagaatggcattattttacatttttgcaatctcttttatgtttggtttaatagaagacaattggattttcttttttttttttggcttataagcaacagaatttatttctttagttatggaggctggaaagttcaagatcaagacaccagcagattcagtgtctggtgagatctctcttctgggttcagagatggtaccttcctattgcatcctcacrtggtgaaagagacaaggcgtctctcctgggtctcttctataagggcactgaaattattcatgacctaatcacctttcaaaggccccttctcctaatatcatcatcttgggggctaggatttcaacataggaattttgggtcacattcagactgtggcagtcttttaaaaaatttctatgtcaattgattttaatactttgataatcgtatttctttttttatttccgacaattggattttcataactgcttctgcatttagtctcttgtgatattaaacaccactcagcctctggacgtctccactgtacacttgtgcgagaataagatgctaaaaggcaattaacaccttagtgccattatgaaaagggtatacctgctcagcccctgtgggacattcctaaaaacccccaggaatcctcaggccactctctaaggactgctgctccacctgtacgtgtaactgctgctccacctgtacgtgtaactgctgctctacctgtacgtgtaactgctgctttgacttatttctcctgccttcattcacccagcatctcccttgctttctgccttccagatgcrctaggctttttgtttcctgaaacatactctttttttgctttgacttatttctcctgccttcattcacccagcatttcccttgctttctgccttccagatgcactaggctttttgtttcctgaaacatastctttttttcgaacctcagaacatttcgatatgtcacctggaattgtccatttttttttcatcttcatgatttgcccttaccccttggctaaataactcctactcagatcttaggttcaatgtcacttcttcaggggagatttctcctgattgattccctttgctataaatgatccaaaagtactttattttttcttcttattcctgattgtcattatacatttatatatgtagttacttgattaaaacctacttttctcagcaggctgtaaatttcttggtgttaagaaccatatctcttttgttcattctattcctgaaatattaaaatttgctcaataaatgtttgttgattaatgcacaaatgggtaaaagaatgagttactcaaaagcagaacaccctgtctttttgacattggcttattctgttaatcatttttagaacatatttatcagattcgcaaataatttgaagctagggaatttaggaagtatcttaaatgacaaaatcaggacgacaaaatgaacacactaaatgactgggacttttaacccccagaatcaagtagaaggtcttttacacaatagtttcctaataatgtggaatcaaatataattgtgttttttgtttgtttctgttactgactcactctcaatatcccacatatttcatgtattagaacagcaaatattatgaggaagtagcaggaaccaccatactccttatttatttatttatttatttatttatttatttatttatttattttgagacagagtcttgttctgtcgcccaggctggagttcagtgtcaaaaactcttctgagtggaaagagcatgctgggaaattcctttctgctgaagaaaacatacttattgctgggtgaagagcactagaagttggatgctttttcaattaaataatgagtacttagtcctttgtttttagccagtacattccattcaactggcagtaagacagtgctctatctttaaagaagcctagcaccttaataatacctagaaactatgctcaaatagataagacttttccatttttccttctttttcagcaatctgtaaaactccaccatctcgtcgagtcacataatagcattacggtctctgtatgtgggagaaaaggtaagttccattattttagatctatatgctattcacatggaatcagaaaagaatttaaatttgtatttctgattgctgctgttattcccatcttcatattcatttctccttaggcatttgttcaaagggatgaggaacttaaktttttttttttaccttaaaaactactttagaccgggtgcggtggctcacgcctgtaatcccagcactttgggaggmcgaggcgggctgatcacgaggtcaggagatcgagacgatcctggctaacacggtgaaaccctgtctctacyaaaaatacaaaaaattagccgggygtggtggcragcgcctgtagtcccagctattcaggaggctgaggcaggagaatggcatgaacccgggaggcggagcttgcagtgagccgagatcgcgccactgtactccagcctgggtgacagagcgagactccatctcaaaaacaaaacaaaacaaaacaaacaaacaaaaaaactactttattggggtggaattaacatttggtaaacttaacatacttatagtgtagaatttgataagtttggcatatgtatattcccatgaaactatcataatcctcaaggtaatgaccattcatcactcccaaaagttgccttgttcctgtttctagtttttttctctcccgcttcctcccaactcccccatccctcaggcaatcatttatcagctttctgtcactgtagattcatttccaggctcaatattatacataaatggtattttacagtatgtattctttgggtcttttataatatatttttggttaattttgggggggatcaaagttcatagttattttgggatttatccatttttttaagtgtatcaatcattgattccttttatttctgaggctatctcagtgtatagacatactagtttgttcatccattcacctgttgatgcatttttgggttccagtctttggctattccaaggaatggtgttatgatcatttggatacaagccgtgtatagacatgctctttcatttcttatgggaaaatacctagctatagaacagctgggtcatgtactagatagatatttaacattttaagaaactgccaatctttggtccaacgcagtggcgccgttttacactagcagtgtatgagagttccaggtgctccacattcttgacaacacttggtatggttactcattttaattttggccactttggtgtgtggtagtatctcatcgttgttttaatttgtgtttccctaatgactaatggcattgaacatcttttcaaatacttatttgctgctcatataccttgtttggtgaagtatttgttcaaatctgttgtttattagattatttttattattaaaattgagagtttattctacattttggatacaagtcctttatcagataaatgatttgcaaatattttctctcagtctatgacttaccttcccattctctttacagtgtttttcaaagagcagacatttttatttttgttaaagtccagtttatcaatgttttctattgtggatcatgcttttgatgtaatttctaagatattttgttaaggtcaccatgattttctgtattgtctttcagagttttagggtttacatgtagttctatattacattttgaattttgtttttgttttttttcgattgagggtcatcttttgcaaacagatatccaaatgttccaatactgtttgttgaaaagattatgttttctccactgaattgagttttcatcttttgtcaaaaatcaattgttcacatataggtggatstatctcttgatttcctacccaatcttattgacctatttgcttttttatagcaataccatacaaagttgctttataataagtcttgaaatagggtaatgttagtcctacagttttgctcttctcttttagagttattttgacactattgagccctttgggtttccatatgacttttgaacacaacctgtcaatttctttaaaaaatgctggggtttctttagaattacaataatttatagaaatacaggcttaagtttgtaaatctttagaagctcatttaaaaatctgttagaattcctcattcagtactaatatgaaatgtacaataacataaacaatggtcacaaataagattcaaagatgccaatgttttatgagatattttccataacctggggttgcttccttagagtattcctaagatgtctactgatctctctgttaaagtcatgcagtgggaacaaatgtygattttctttgccaagaaaataccatagatgaacattaaaaacagttctgtaagccaaaattcacatctgcacacacttaaaatgtagctctgttttaaaaaataataatttgtaatacatcctgaaaaacacaaaaatgctctacacctggctgggttaccagtgtttagccataagtgcagtgatacaggttatgcaattactgaaactggtaagtgtattctaaattgtggaaatatgtatgtgtttttgtattataaccctttttggtatctatttcaggcttgtttatattatatacatatgtagaatataaagttcaaaacatgctctagtgatgtaaccaaccaattaaaggaaataaaatatttttaaggggaatataagtttttttcctggttaaaaattatttatttattttggtatatgaataagttctttcgtggtgatttctgagattttggtgcagccatcacctgagcagtgtacactgcacccagtgtgtactcttttatctttcactccccttccaccctttcccctgaatctccaaagtgcattgtgtcattcttatgcctttgtgtcctcatagcttagctcccacttatgagtgagaacatatgatgtttagttttccattcctgagttacttcgcttagaataatagtctccaatttcatccaggttgctgmaaatgccattatttcattttttatgtctgtatggtattccatgttacatatatgccacattttctttatccactcatagattgatgggcatttgggcttgttccatagttttgcagttacaaattgtgctgctctagacatgcacatgcaagtatctttttcatataatgacttattttcctctgggtagatactcaggagtggaattgctggatcaaatggtagatttacttttagttctttaaggaatctccatagtgttttccatagcagttttactagtttacattcccaccaacagtgtaaaagtgtttcttttcaccacatcctcgtgaacatctcttattttttgattttttgattatggccgttcttgcaggagtaaggtgatatcgcattgtggttttgatttgcatttccctgatcattagtgatgctgagcactttttcatatgtttcttggccatctttatatcttctttcaagagttgtctattcatgttcttagcccaatttttgatggcattgtttgtttttttcttgctgatttgtttgggttcctcgtagattctgggtattagtccttcaacagaagtatagattgcaaagattttctcccactctgtggatgttctgtttattctgctggttatttcttttgctgtgcagaagcttttcagtttaattaagtaattaagtaccatgcatttatctttatttatttatttatttgcatttgcttttgggttcttgttatgaagtctttggctaagccaatgtctagaagagtttttctaatgctatcttctaggatttttatggtatcaagtcttagatttaagcctttgatccatcttgagttgattttttataaggtgagagaagaggattcagtttcattctctacatgtggcttgccaattatcccaacaccatttgttgactagggtgacctttcaccacttgtttgtgttcgctttgtcaaagatcagttggctgtaagtgtttggctttatttctaagttctctattgtgttccattggtctatatccccatttttatactagtaccatgctgttttggtgactgtggtcttatagtatagtttgaagttgggtaatgtgatacctccagatttgttctttttgctttgtcttgctttggctatgcagcctcttttttggctccatatgaattttaggattattttttctagttctgtgaagaatgatgatggtattttcatgggaattgcattgaatttgtagattgattttggcagtatggtcatttttacaatattgattctacccatccatgagcatgggacatatttccatttgtttgtatcgtttataatttttcagcagtgttttgtagttttccttatagaggtcattcacctctttgtttaggcgtatttctaagtattttattgtattttgcagctattagaaaagaggttgcgttcttgacttttttctcagcttggtcactgttggtgtctagcagaactagtgatttgtatacattaattttgtatcctgaaactttgctgaattcattaaccagttctaggagctttttggatgagcctttagggttttcttggtatactatcatatcatcgatgaacagcaacagtttgacttcctctttactgatttggatgccctttatttccttctcttgtctgattgtcctggctagaacttccaatattatgttgaatagaagtggtgaatgtgggcatccttgtctcattccagttctcaggggaaatgctttcaacttttccccattcagtataatgttagctgtggatttgtcataggtggcttttattaccttaaggtgtgtcccttctatgccaattttgctgagggttttaataataaagggatgctggattttgtcaaatgctttttatgcatctattgagataatcatgtgattttgttttcaattttctttatgtggtgtatcacatttattgacttgtggatgttaaatcatccctgcattcttggtatgaaacccacttgatcatggtggattatctttttgatatgctgctggattcagttagctagtattttgttgaggatttttgcatctatgttcatcagggacattggtctgtggttttctttttttgttatgtcsttccctggttttggtrttarggtgatactggcttcaaaaaatgatttagggaggatttcctctttctctatcctgtggaatagtgtcaatagaattgataccaatttttctttgaatgtctgatggaattcagctgtgaatccatctggtcctggactttttttttcttggtaactttttaaataccattttaatcttgctgcttgttattggtctgttcacatttttcctggtttagcctaggagggttgtatatttccaggaatttatccatctcctctagattttctagtttatttgcatataggtgttcatagtatccttgaatgatcttttgtgtttctgtgttatcagttgtaatatctcccattttgtttctaattgagcttatttggatcttctgtcttcttttcttggttaatctcactaatggtccatcaattttatttatcttttcaaagaaccagctttttgtttaatttatcttttgtgggctttttttttgtttcaatttcatttagttctgctctgatcttggttatttattttcttctgctgggtttgggtatggtttattcttgtttctctagttccttgaggtgtaacctgagattgtctatttgtgctctaccagactttttgatgtaggcataaaaaagttgggatttttattggtattgtgttgaacctatagatacatttatggaaaattgacttagtaacatatttcaatctttctctctatgaatataacactgcttcgtttgtttaggttttttatttctttggcagtgttttgcagttttcagtgtgtgggtcttacacattttttctgatttatttttaagtaattcatatttttgatgctattgtaaatgatattttaaaatgtaaatgttcagttgttcatttgctagtagttccatcatggaaacatgctgatcagtagtttgcttcacactaaggagagaccctcggcagatcttcgtggctctcccctggacagttacctccccagcactctgctctatgaactcaagctgccaagatctccatygatgctcatctttgtgttctgaactcagtagtcatctggacttggtctggtttcccttctctgcatagtggcttggaaactctttaaagacagtaagcgtggcaaatgtagaacacctttatttgtttcccatctctttcgttgtttgatgttcagtgtctataacccattgtttcatatattttatatggttgtttccagtgggaagataattctcatcctttttattctctcttggttggaagtgaatttttaccttttaaaaatataattggtcattttttgtccatattttttatgataaaacactttgaacatatacaactgtagagagaatactgtaataaatcctcacgtacctatcacacagattaaataattatcaacttaatgaatcttttttcatctgttctattaactctccaccctagattattttagaactatcccagatattatattttatttgaaaatatttcagcatatagctctaaaatataaagagtctttttaattcctttgtcacatcttttaaaacctcataattttaaaatagttatacaggcaatgttcaaatttcctcaatagaatcaagtactgtgtagacatacttatgatacatatgcaagcacgctttgttttattgccccttgctttattgtgcttcaaagatactgcatttttttttccaactgaagatttctgacagtcctacattgagcaagtctatccgtgccatttttctaaaagcgtgtgctgtcttcatatctctgtgtcacgtgttgataactctggaaatacttaagactttttcgttgtgattatatctgttaaggcaatctgtgatcagtgatatttgatattactatgataattgttttggggcactatgaaccatgctcatgtaagatagcaaacttaatcggtgtcagatgttcaccaactggccattcctgtctctctctctctctttcctcaggcctccctactccctgtgacccaacagtattaaaattagatcaataaataaccctaccctggtttctaagtgttctagcaaaaggaagagttacatgtttctgattttcaagtaaagctagaaatgattaagcttagtgaggaagacatgttgaaagctgagatacactgaaagctgggactcttgcaccagttagccaggttgtgaatgcaaaggaaaagtttttgaaggaaattaaaagcgcttctccaraagtgaacacacaaatgatcaaaagcgaagcaacattactgtggatgcggagaaagttgtagtggtctgaatagaagctcaaaccagtcatatttctgtaaggcaaagcccaatccagagtcaggccctaactctttaattctacgaaggctgagagaggtaagaaaactacagaagaaaagtctgaagctagcagagtttggcttatgaggtttaaagaaagaagccatctccatacataaaaatggacggggaagtagcagtaccagatacagtgcttataaacctcaataagaatgttgcaagtactcattttaatggtgttagtcattgtttctaggtctttttagaaaacatacttaggaaataactttttaagataaaatgcattatgaggtcatactgacctcataacttccaattcaagtttagaattcatagttatactgaccttataatttccaattcaagtttagcactatgggctttttactttactttattcattgtacttgtgtttctcttttctctatacccaaagttctggttctcaatgacaggaagagattactcttttgctttatcccattgtatataataacctcagagtgacaaactaatgcactcagcattaatgtaattcctaaaaacaatttaagatggttttagaattctttttttcctgtttgtaacatcccattagaaatgtacagtcaaattatacattgttcattaaagtcactcaaaakagttttctgttggttatgccagcaacttgataggtttattttgctccttttgctttagattttagtgttagcttttcaaacttatatttgtattattttgtatagatatagaaaatatctacatggtttgaaagtcaaatctgtaagacagaagacattccagggagtctggttcctattcctctcctttctgacttatgtcttcattctctctataatcatcactttggtttttatttattcttacatttaaaaatataaacagattatatataatattcatagctatatattacatatacaaaatacaatatatattaatactgctgttttctagatgaatagaggtatatcaaacgtatttaactgtatttcctgctgcgtatattttacatacgtaactatgtttcccagggaccatttagtatatacagatattcttcattcattatttcagctgcatggtactctcttgtgtggaggagccattgtttattcagtcaatcctctattgaaaaaacatttctcagttttttactactacaaatagtgctgtaataaaaagctttgtacatatgtcttttcatatttttgccagtatatcttcggcacagattctgagaagtaaaattgctaggttaagaaataagtgcttatgtacttttgctagaaaaatattgccaaaatttctctccataaagattgtgccagtttacatttgcaccagaaatgtgtcagtgactgattcctcgcagccttgmcaatagaatgcgctggaaattttgcacatttttctaatcataaggtgagcaatgttatctcatacatatgtctcactctcttttttagaaagtaatttaaaacttacaaaaaagttgtaagaatagtttaaataactttttttctagaacttcttgagaataagttgccgacatgtagctccatgatcatgacccgcacatcctttcatgtaytccttttctctgtttctttctttctttctctttctttctttttcctttctttctttctttctctttctttctctctctctttccttccttccttttttctttttctttcttttttctttctttttctttctttctttctttcttcctttctttctttctcgactctctctccttcctttcttccttcctttcttcctttctttccttctttctttccttctttctctctctcttttttcttctctctctctctctgtcttgacagggacttgcactgttgcccaactggagtgcaatggtgcagtcatagctcactgcagcctcgacctcctggtcccaagtaatcctcctacctcagcttccagtgtgcgccaccatgcctggctaatttttgtattttttgtacagatggggtctactgtgtatttcttttcttttttgtttgtttttttttttttttttttttttttgagacggagtctcgctctgtcaccaggctggagtgcagtgcagtggtgcgatctgggctcactgcaacctctgcttcctgggttcaagcagttctcctgcctcagcctcccgagtagctgggactacaggcacgtgccaccatgcccagctcattttttgtatttttagtagagacggggtttcatcatgttgaccaggatggtctcaaactccagacctcatgatccacccgcctcgtcctcccaaagtgctaggattacaggtgtgagccaccgcgcctggcctctactgtgtatttctgaaagacaaagacattttcctacatgaaggactgtgcaaccaggaagttaatattgatgcatttctcccaactaatggtcagacctcgttcgtgttttgccagttgtctcaataatgttctaatagaaaagagatacagaattacacaatgctcttgtttgccatgtctctttaatcttcaatttttagttgaattctgtgactttgactcttctgactctggttattttatagaatgtccttcagtttgaattttctgatgttgcctcatggttaaattcaggttatgcatttttggctggaatatcacaacatgatgctgtgttttcactgcttcctctcagatggtacataatttcaatttgtcctattactggtgatgttaacttatattacttaattaaatggtatctgccaggtttctccattgcaaatttattattttcctctttgtaattaatggttattttgttgagagatactttgagatgatataaataaaccatcttcatcaatttttcacccactagttttagtatacattgatgtttcttggccaaattaattattactttgatagttgccaaatgatgacttttctaatgttatctctccttctacattaattagttgccattttgctgcaaggaaaacctgtctcttctccttatttatttattcatttactgaagtcattatggactcataaatccttattttatttgatggttatagttctttcttatcattatttactttgatgttcaaattgttacagatttaggcagtgagagccctttaaagttggctttgatatttttgtaatatgtccccaacattctttgagcatttctttacttaatggcacaagaagatgttctagcttatattatacttttcttggckcagcctgtactcagtcctctctctaaggaaacctttttattgggagaaagggaatttagaaaccaaactttgggcactggatgtgctcattactattggtgtataaacaagaagactagcaaacatgtttatatattcttataatcacacatacttacatctatattgtttctctctatctagtacattgatatttttcattggaatctactatcacagggtttattgtagttgtatctctttctctatttgtaacttcctttcttcagtgagaaacctggctgattaacgtcattttatctacaggagtcccctcttatctgcgggaggtacattccaagaccccaggtagatgcctgaaaccatgggtagtactgagtctgatcaccgtcatttggaacacgtttctgttcctgtcttccacccacacatttaatgcctttaccatgttatctaagcacttacacactgtggttgtaacgtttgcagtttgaggtgcgacgcacaactaacacaaatttctttttccttcttcacaacttcacagatagttgattcgttcttactatagatcttagcaacctcagcatacagttttgttttctttaagtcgagaacgttcaccttttcacttaaaggaagcactttgctgcttctctttgatataactgaattgcgagcattactactcttgtgctttggggcacaagtagtaaaatgagggtaacctgaaacaagcacaggggtactgcaacaggcaaggtactacccaggtgactgacaagcagggagtgtataaagcatggattctgttccaggtgggatggagcgcatagccctagatttaatcactactcagaatggtgcacagttggaaaacttatacattgtttatttctgggattgtccacttaatgttttctgactgcagttgactgcaggtaaccgaaaccatggaaagttcaactggagatcaaaggagactactgtacttattgtaccatttctgcctggatgcaaccaatctttcatcaccgctgatgctcccactgcccctcatcccactcctatgtagacacccttttcaccttgctcgggtcccaacatcccacagcgggccactgccaccatgggggcccttctgtccttgctcaagctctgacaccctataccaggtcatgtaaacacccttccatcctgcttaggatccaataccccagagcagcctgccaccccacccagccccctgcaggaatgcctatcttgcacaggccctaatagctttaagactgaataaggaagaaaagaagtaaaggcaggcaggcaggcaatcaggaagcagggaagaactttcatttctcttatcatgggtaagaatgaacagctttgcagacacttaacacaccacttgtgtttgtgtttktgtgtgtgtgtgtgtgtgaagtgacaatatctagcaattttgctatacagttatttgctggagatctgtttttaaaaggaactctttatctattaggatttttttttttttgaggcaggatcttgccctgtcacccaggctggagtgcagtggcacgatcatcactcactacagtctcgacctcctgagcttaaatttaagcaatgttcccacctcaacctcccaagtagctgggagtacaggtgtgtgtcaccatgcctggctaatttttttattttttattttttggtgaagatagatagggctcccgctatattgtccaggttggtctcaaacagctaggctcaagtgattctcccgcattgggctccaaaagtgctgggattacaggcatgagccactgtgctcagctgggaatattaaccttttatctgtaatgtaagtttcaaatttgcttctgaatttgtcattatttttttcttattactttgccacacaaagatttttattttatgtagtctaatttgttacatttttttctttttgttttcaaattttgaatcaatgttgaggaatgttctcctttctaaaaaaaaaatgtcttggttgctttttcattgatatccaagttaaatagatgttggattgtatttttgtgggaaaataacctgactcaactctgtctcctcccactttcagctggagttcaagagctggaatcacgcgtcctggtgcctggagatttattaattttgacagggaacaaagtgctaatgccatgtgatgccgttctgattgaaggcagctgtgtggtggatgaaggcatgctgacaggtacagttccatctccacagctgacaacctctgtgggctggcccacactccacgctgctatggtccctacgcctcctcctctacctgaatgacagtggctggctgtaaagcactggctgctatgggaccttcccgttgccacaaatcttacttagtcctgctgcgaatggatctgagggttcaaattaaagctctttctatgtgttaagtttgatacaataataagtttttgagtgtttagtatttctttcttgaacaaaagattattacaaccctctcatttaccttaaaagattgtagagatcattagatctttcagaattgtctgtgacttttatgtttatttattttaaataaagcatgtttttaaataaacttggagggtttgaaaatcatcagtgacatcctgaaacccacaggggtcatccaaattcttcctggcctggcttgaaaatgttaagaaattcatgatgcagcatttggtaaagctgytgcttccagtccaaaactgggtgttatggactaactgtagttcattttcaaatggcagtgctggagctgggtgggacctgtgaggttatctcatatcataggcatggcaactgaggtccagagaggtgacttgcttaaggttacactgccttgatttctcactcacgtggcataatgatgagatgtttggctgacattgctgtaagataaagaagaatcataaaatgtttctcagagataaaatgagaggctgtgaacgcactcttattggtgtatcatggttcccattcaagttcagatcaaatccatttctctcaggcagcccagaaagacaggtaatggagacaagtgtacacaccttcttcctatgttagcttacaaagaatagatgtgtcgcagaccatggcaaagcaggttcttttccctcaaaatcccatagattcataaaaatcctgtaatgctgggacttctgcagtgccaagtaccattttcctaatgaaagtagccttaatatactgtaatgcaactccgactttctattgaccactctgcagagaccatcaaaagactttagaaacttgttcctcagaacaggccacagttatttcatggcttcattcattaccttgtattagcacttcaagcctctgcaatagtcccctcccactgcactggtaaaagttgccaaagtcccaattgccaaacgcagtggactctttaaatttctttatttttgagacatagtctcactcactctgtcacgcaggttgaagtgcagtagcttgatcttggctcactgcaatctctgcctcccgggttcaagcaatcatctcatctaggcctccatcaagtagctggaattacaggtgtgcaccaccatgcctggctaatttttgtatttttagtagaggtggcgtttcacgatgttggccaggctggtcttgaacccctgacctcaagtgatccaccctcctgggcctcccaaagtgctgacattacaggcatgagccactgtgcccagcctgattctttaaatttctcaacttaytgtcctgtctgttccatttgactattctgaccagctctctttctgaaaactatcttctctataactttctaagataattctctctctccaaattcttctaccactgactatacccattcagtttcttctgctgctcctcttcctccatctcctgaattgttggtgctgctcatggctacatccttggcctttcctcttctcactctatacttggtctctaagtaatcttgtctgcttctgtgactttaattatcatccataacctcatgagctctggctaaatatctctcgtccaggcctctcatctgagcttcaaatccaaataaatctcaaactgcctacaaggcttctcaacatggtatttctacaaggcaacttcaacttacagtggccaaaagacaattctttctctcctcctgtaatccctgtgttgaggaataatgttgccttctgcatattctcccaagtcagaactagaaagtcattgtaaatttctctgtccctatgacctgccaatacaaacattttctcaagttttgtagcttcttacttccttgtttctttccttttttgagacagagtgtcactctattgtccaggctgctgtgcagtggtgtgatctctgctcactttcacctccacctgccaggctcaagtgattctcgtgcttcagcctccagagtagctgggattataggcatgcaccaccacacycggctgattttgtatttttagaaaagacagggttttaccatgttgcccaggctggtcttgaactcctggctcaagcgatctgcctgtctctgcctcccaaagtgctaggattaaaggcgtgagccactacacccggccacttccttgtttcctgaatgcagtgcttcctttctatccccactgccagctgttatagttcagacctcatcccttgcaactgggattcctgtgattatttcccaattggatacccagcccagcctccaacctcaccagactttgattcattccctgtgctatggacagagtgctctctcttatacataaatatgatattactctcctgattaaagtggttaaatctctctacatcctccttcagtcaccagtgcctttatttatttattatttatttatttatttttgagatggagtttcactcttgttgcccaggctggagtgcaatggcacaatcttggctcaccacaacctctgcctccygggttcaagcgagtctcctgcctcagcctcccgagtagctgggatcacaggcatgtgccaccacacctggctgattttttgtatttttacaaaactggggtttctccatgtcggtcaggctggtctcgaactcctgacctcaggtgatctgcctacctcggcctcccaaagtactgggattacaggcatgagccactgtgcccagcccaccagtgcctttagacatatctgtggacagttagggttctccatgctttggctcctagatagctctcacggccctttattctccacactccacattcttgactgcacagcctgtggttccctaaatagttatttccagctatcttgacatctgtgtttgatttacagtacccacagtatttataatactgtattatacttatcagtttacatatctgtctcctattctaaactacagacctcttagaagtaagaactatgtttatgcttgtatcccsaatacctagggttgtctctgccacatggtaggctcacaaaaaaaatgtctgttgtatgatgagtgggtgcaggcatgatttaaatgarggaagccatcctgcctcacaaaacaagatgcttgttttctgtaggagaaagtattccagtcaccaaaactccgttacccaagatggatagctctgtgccctggaaaacacagagtgaagcggattacaagcggcatgtcctcttctgtggaacagaggttatccaggccaaggcagcttgctctgggaccgtgagagccgtggtactgcagactggttagcatcccctcctttttcttatttttaatggtatacttttgcccagtttgtctagtgccttaaatttattaggtaaagagaagctgttttttctttataatcatatttttttaatttttaatttttgtgggtatatagtagctgtgtatatacttatgggatacctgagatgttttgacacaggcctgccatgtgaaataagcacatcatggagaagggggtatctattccctcaagcagttgtcctttgagttacaaacaatccaattatgcattttaagttatttaaaaatatataattaagttattattgactatagtcaccctttgtactatcaaatagtagatcttattcattctttccatttttttttggacccatagacaaggagaagtcttacctacaggtacaaaacacatcatatatatataaatccatatattttaaataccaattgaactatggcatatgcctgttagtaaaaatgatagtactgataacaataattattatgtatgtgcctttgcagtatataaactattttcacaatatcaaacaagcagagcagagatgcttactgtttctgctatgtccatgaataggctgaggccacacaattcaaatgaacttaaaaaaataccatggccagcaattgacagagctggacctagaactcaggtctcatcctgaatcccaagttctttccagggtgggctagaaactgaaaatttaacattgcaaagtattagaaaagtgagtccatcagtatttactggaccacttaatttcaattcagtgacatgtgtgtgcgtgcacacgtttgagtcattttcttaaaataaaatgctatttggcaaagctgtgctgtgcacccagtacggcggttttctatctccaggatgcattgaaattggaagtagagggaaggaaggccagagagagtactgggctctgagatagagatttccgttccagcatttatgtatttttctagttatctttcaattgcctttgagcttaaacactgttcaaatatcagcagagaaaaacaaaggcagtgttgaggtttggaagagctagcagtagcgttggtctcctgagagtgtggggtgtgtgtttgttgttccaggattcaacactgcaaagggagaccttgtgagatccattctctaccctaagccagtgaattttcagttgtacagggatgccatcaggttcctcctgtgccttgtaggaacagccaccattgggatgatctatactctgtgtgtctatgtgcttagyggggtaagctgtctttgctcttttattaaatgcacacacactcatctctgtatattttgtactgtgcatgttggccttaacctaggatgtggtttacaaacctgggaaacaaaaccaagcactgatgcctacgtatagacttccagatcccagtcagcaattgatcactaagttccataataacaaacaggtttcatgggataatgggataaaacaatctgtttattgatatatcagtgtacttctcttttcctcacactttataccattttttcttttcaatctgagaatatatttctttcaataaagtagcatatttagagctattgagcaagggattttaaataaaatcagacacccagttttggtgaggtcatggcagactagtacgttattgttttgctggtaacaatataaatcacatgggttttttattgctatttggtgaaagatagtgagagctataaacatggtcatgcctttaacccactgatatcatttcttgaaatttgacctaaagaagtaaacaaaaagaaggaaggccgggcaaggtggcttmtgcctgtaatctcagcactttgggaggccaaggcaggtggatcacctgaagtcaggagttcaagaccagcctggccaacatggcaaaacccygtctctactaaaaatacaaaaattagccaggtgtggtggcgtgtgcctgtaatcccagctactcaggaggctgaggcaggacaatcgcttgaacccgggaggtggaggttgcaatgagctgagatcrcaccactgtattccagcctgggcgacaagagcaaaactccgcctcaaaaaaaaaaggcaaagagtcatatgctgttcatcagagatttgtctgtaataattaaagaatgactgtcgtccaggaacctccagargaggtggtgaggaaagcccttgacgtcatcacaattgcggttcctccggctctacctgctgctctgaccacaggcattatctatgcccagaggaggctgaagaagagaggcatcttytgcattagcccccagaggatcaacgtatgtggacagttaaaccttgtctgctttgacaaggtatgtgtgtttcmtccttattcttatcatcatttttaccattgctgtcatcatgtatatctacttttacccccttgcaaggcaggagacatagaatgtgggtgcctgtcttcattttatccctggttagatgcatgatctgggaaagatatgtctcttgagctcgcagagtccaaggtttagaggagaagtgggtactaaataggagaatctttttgggtccttccagctttgatatcctatgaaaagcaattaaagtagcatcctgtttctctgcagtcaaaaccttcatacaaagacgaaaatttaaaccctttgctatcgtcactgctgtatccttgatgctgagaatattgcctggcatatagttagtgtgcaataaatatcgattgaattaatgaacaaataaaaaaggaagagtttattaaactgtgccttactatgatactcatatcaagcttttgctgtattttcccatctgtactttattgcttaaaattacccttgattatttgccagttattcccaaccagcctcgtattctaccgtctttttattgtatttatttagtctgtacacacatatgctggggtgaaggtgggagttgtgagagaataagatggaaatgcctttcagggcattgtgaacaggtgagcatgggtagaggcctggaggcaggaaagcaagagagtgtggttttgactagagcaggatgttggtaatgggagaagctatctgtggaccttgaatgtgtggctaagaaattgtttacatatattttaagcagtggagggttatttgaaggcttttgttgctgttgttgacttctttctttaatttactttttaaatgtggtaaaatacacataacataaaatttactattttagccatttttaagtgtactgttcactggcattaagtgccttctcactgttctgcaaccatcactactattcattttgagaacttcttttattttcccaaactgaagctatattcattcaacagtacactgaaggttttgatagttgagaattaatgggatcagggctgtattttatagttattggaatatcagaaagatctaccaagaacagaaagtcaacatgactcttgccaccattttgtatattattttgtgatcaaactagcaatgtaagaaatgacattctatttatgagattatatcctcggacctggaaaaagaaacaggagtgggagagataattgtgacctcaatttgtataaaaaatgagcaataattatgaataattatgattattattagcttttactgtatgctagatattaaatgaaacactttatgttatcccatttaatcttcaccacagctctctgagattatgaccatgttacagataagagctcttatatttagggggattaatttgctctggtcacacaactggtgtttaaacctaacctgaattcttaaccataatattgcactgagagaaataccaccacctttttttttttttttttttttttyaccaaatagcaaaccatttctttcgagtctgttcacagtgccctgcaggtaaaaatttcactctattccttattttaatgacatattttaaacttctgctatgaaactaggactcacccattttatatcgaggactttcacatccattcagtctaccattagatcctcaaaacaatcctctgaagttgtgaggaagatactttttttgttgttgttatggaggacactaaagtttgaaaagattaagtgccagcttgttagacaactggcatgagctcatcaacgcttccaacgggcactccagagacccacccattgtgcccctccttgaagtgctgatcttgttaatatgtttgtgaagtattttctcattacaaaaataccttatttatctgcactacggagtcttcgctatggggccactggatttttttttttttwaaatagggaggtggtttcattatgttgcccaggctggtctyaaactcctgagttcaagtgatcctcttgcctccgcctcccgtagtgctgggattacaggcatgagccaccrctccttgcctggatcttcagagtaaatggagcatttgtttctgtttagacaggcaccttaacaagggayggcttggacctctggggagtcgtgtcctgtgataggaatgggtgagtaccttggactcttsgactaaatgcattctagtgtctctttttccaaaattccgtgttttctcttgaaattaagaatggagacatttggactttggctttggtggacaatgattgccaaagtatcttcttttaacttctcatctttaattcttcaaagcctccctaaaacacacacatttccccccatcccaacccagtcccatgccactcacaaatcctggagatgaagctttgacactgcattcaaatccttgctaaaatataatttgcttccagcatgaagttgacgcagtataagtaatttagacattaccaggacactgtcctttaaggaggtaacattctttgttcaagctgaagcctcttgatgtgctaggaggaaggacactgctcttacttttgtaccctgaatttcaggaagaggaacatttgtagaaccgtagctagtgtactcatgtttcttggtattcaaattttgagaactctactttctggctgctggaaactctcttttttcttttttttttttttttgagacggagtttcactcttgtcgcccaggctggagtgcagtggcatgatcttggtgcattgcaacctccgcctcctgggttcaagcgattctcctgcctcagcctcccgagtagctgagattacaggtgcctgccaccatgcctggctaatttttgtatttttagtagggacggggtttcaccatgttggccaggctggtctcaaactcctgacctcaggtgatccgtccacctcggcctcctgaagtgttgggattacaggcatcagccactgcacttggctgaaactcctttttcctagcaagaaaagacggttttgacagttctcagcatggtgtggtaaagatttgcacagtcctctcctgtggccctcttgtggccatgtttgagtttgcgtctctgcccgctttttcaactcactacgaactcccgtggaatcagaacatgaaatctctgatgcacttgacgtttatgttttgtttgaaaatgaaagttttttcctctaacacttataacttaaatcacaaagcattttgtacatgaaaggttctttgtggttcttttgcattatgacatgtaatttatccataaaatgttaattacacatagtttaataattgtcatattaaaatgctatctagaaacaagtctaattcctggattaaaaaagtgatcctcgtgcttctaaccactttagtgtacagaagaggcctctgaaagtgttaaactctaaagttctttcatttttcctagaagatagatttggatatatactttgtctcatggttcattagtgtttttctgtttcagcttctgcaaaatatgtgtacatttgttcaaatatgtgagcatcttgagagcagtcttgttcttatttagatttgcatcctaagtgctgtagctctgtactaggcacaaatagtaggtgcacagtaatcgctcatctaaaatgaactcaatatgttctgtcttttgaatgttcttcttattccattgacaccaaactattcataaaactttggaaactttgtttctaaaagtgacttgttacatttaaggaataacaattaatataatgtttaggtaaatgattcatttccctcccttccttccttccttccttcctgccttgctgccttcctgccttccaatcaaagttgaattccaatgattaaaacaatttaaaataaaaaatgacaaatttaattaataaaatgaaacaaaacagaattaattctaggtaagaagtgagcacctgacttatagactattcaataccttcttgttaaaggtgagctcatctctgatatttcttcctttccaaaaagccctgattgttgtgtcagatactttaagaactattaaaggctatcagggattgataaccagaaatactcagataaaaatgggtggacaggaatgatagagagctttatgtatttgctgtgctaaacagagtctggcccaatcctctcgaatgcagaattatacactcagaattacggactagtgacagtgtacgtctcatagtaaaaataagattttttttctgatctgtattttgcttttcagtgtgcgtttaagtttctgtgttaactgtcctgctggtggtctcttccttttagatatttactaaaataccattgggtatgtggtaaaccaccaagatgagctgctcttttaagacatagtaataagtataactaacagggtcaatatgaagccaggacatttttgaactcttagtgtgacaaaaggaagcttgaatgcaaaagccaggaagccatgtggctgaattgtgagttaacactgagatgtgtttgctttcaaaacaaagggctacagcaacttaaggttatctttaaataaattcagggtccatattatcagaagtaattgtctgtcttgaaatgtggtctccaggatcagacaatgacaaatttaggaacttttccaaaaaagaagaataaggaaggtgagagggaggcctgatcaagctgttattagaggaacagccggaggttcctgtgcgacaccagagggagagagggtgaaggggacggcagagttgatccctaagtttgaaagaagttggcatgtggaggagggggagcaagtggacccttactggctcccaggagcagattctgccccaatgtaggatgaagcttccaccgttcaaacgtcctcctaatagggtaagctgctttgagaaccaacgcctgtgctgcacatttgagaaggggctgtgactaaccaagctgcagacaacattcttcttgtgacgccaaagctgaacttaatggcctccactctgaattagtgaaggaagcctgcatatgacatttgagttgtattttaatagctttttagatgagactatgttcttatctaaaatgagatgatggggataatggttgggatatggacacaagaggccagggtggaagagggggatgcagtgttcatttgaaaaatgtttttagccgggcacagtggctcacgcctgtaatcccaccattttgggaggccgacgcaggtgggttagctgaggttgggagttcaagaccagcctggccaacatggtgaaaccccatccttgctaaaaatacaaaaaattagcctgacatggtggtggctgcctgtaattccagctattcaggaggctgaggcaggagaatcgctagaacctgggaggcagaggttgcaatgaatcgagatcacgccactgtcctcctccagcctgggtgacagagtgatagagtgagaccctgtatccaaaagaaaaagaaaaaactcagagacctttctcatactcagtgaacttacttggctgaatgaagcactattaatgtgggaggattggagagtggctattaatgcaacaaagcatattaaattatttttttataaagatgtttgttcacctccaagatgctctgttttgkcatgaggcgatggaatggaaaccyatttccttttctccttaagctttcaggaagttcacagctttgcctcaggccaggctttgccatggggcccactgtgtgcagcgatggccagctgccactctctgatccttcttgatgggaccatccagggagaccctctggacctcaaaatgtttgaagccaccacctgggtaagcctctgctcttcagagaatctgagaagcttcttcaatgccagagcaacataggcaatatcagagctatctaattcttataaaaggtgaggtttccaatgtggagtacatttggtagtgaagggcaaaccaatctaaggctggtttcctcatctgtgcaatgaagctaataatagcatctacataatgagattgtgaggattaaatgagatgatgcagtaagaaaatccttggcactatgcctggcaaatattaaaggttcgatcatattaatataattgtacttattatgcagttatttcttgtctctctgtactgttctccgagcattgtctggtttcgaagattttccagaatatggggatcagaaaacattgctttctccagtgctcaggataactcatagattcacggggactataagtcttayttctattaatttcatattgattttatttccaagactagaaagaacaaaaaggaaaaccactaaagagcttttgttgagactctaaactagatttaagagccaacagtgtcgttcaggaatctggcttttccgattctagttttgtctctgctctaactgactgctgaatcccattaagctatctctcatgttggggctttggctctcatgaccataaaatgaagttgaattagaccagtggtgttcacataacacaaaacaagacaaacaatctggaatcttctcgtaaaaggaaacgttctccagaaacactctaaagactaaatagctggagttactccagttgaaataaaaggtgggatctaaagatgaggactaagggacctgcatccctgactacttagctataatcccttcctttctcctgagctgcatatagctctcgcctctggtggcacactttgagcaccactgaaagagacaatcttcagggtcccttccaaatctcctggagcattatttcatagcaatctaatataactttgccaatcctccatcttttctgggttactgattccatatctttaaatagggattgcagttttctctctgggaccttgtcagccactcagtgagatgattacaaagcactgtgttgtctttgggtaaaaggtccctttgactataatttagggtcattattatagcaattactgattattaaccatgtatatcacagtctctgccctgccctaccccagccctgagaaccatccatccaaattagacacacatgcaagggcaggaagagccgtgaagtgcaggaaaagaacgacagaaaggtgcttgcttcacacaaaagaagtctggcccttcatgtgcatggctttcaagctaggctcttcagaaatggagactgagcctttacacagcacattccaacagagaaaacaagataaattgcatgaataattcaaaagtgtctgcccttcaagttgtgcagcattttcaatgcattctttttttctgtggyggaataaatctggttcacctctgagggaagagacacrgaaaacacattgaggtggtctgagratcttctcaasgggagggttcaagcatagcatcagtgggcaaacaataaataaatctctgcaatgaaatatcctatttgtgaaataggaaatggctttttctggggacgatttccacatcaagggagtgccggcacatgccatggtagttaagccctgcagaacagccagccaggtaagccctgcttgctcttcaccccacaacacccaaactcaaagagaaactcttctggcccccagtttttgaaaggtcacagatgtgtctttgaatttcaggtgtgaaaatgggtgagaccttcccccttatttgttaaaatgaatattayggaaggagtggttaattcccagtagctagaagctgtatcagcatgttcctctcctttccccatccctcaaccaggtcccagtggaaggaattgcaatcctgcatcagttcccattctcatcggcactgcaaagaatgacagtcattgtccaagagatgggaggtgaccgactggcattcatgaaaggtgcaccagagagggtggccagcttttgccaacctgagacaggtctgtracttgacttggattacacctggcaaatctgtatctccagataaatatgttcccactgcatttgatctattaattcaatcgcctatgggtcatcaccaattgggtggctcactggcattccaaattcaatacgaaaaccaagcgtgtctttctcatttcctgtatttcccagtttcctattttggtgcacggtaccaccatcccccgccaccaccccatttacgtgtcatctctgatttctcactcccccttagtgcctctgtctcatcagttgctagtccatggtccttctctgcacctgctcatgctttcatcattcttcatcacttcaatagttggtggattgaccctctgcctccagtctcctcaactttgatttgccctctgtactgtgaccagattttttacctcacgattattttagttgctctcataggctccwgtataatctcaaatttctttaggatcatatataaggctttcaggtttgaactcccagtgaactttccagatgggccttaccactcctcatcctgtgcttttcctgagctgaactaagtcttcacagcttactctcatgcctccatgcctaagctcatgattctccctcagccccagaatccttcctttactgaaccacctcctcccaggctggtatgtacaccaccaaacgctttccatagcatgctgcagtggcatggatcatagcaatgatctcatttgattgcattgttagtctgctggctgtaactcaattagacagaaatccttagagcagaacttgtgagtttttttcaatttcactcctttttttaacctatattttaagttcagtggtacatgtgcaggtttgttacataggtaaacttgtgtcatgggggtttcttgtacagattaattcactgtccaggtattaagcctagtacccattcgttatttttcctgatcctctccctcctgccaccctccaccctacaacaggccccagtatgtgttgttcccccctatgtccatgtgttctcattatttagctcccacatataagtttggttttatgttcctatgttagcttgctaaggataatgacctccagctccatccaggtctctgcaaaggacatgatctcattcttttttatggctgcctagtattccatcatgtatatgtaccacattttctttatccagtctaccattgatgggcatttaggttgattccatgtctttgctattgtgaatagtgctgcaataaacatatatatgcatgtgcatctttataatgcaatgatttacctgtctttggctatatacccagtaatgggatttctgggctgaatggtatttctgtctttaggactttggggtatcactgtgttttcttccacagtggtttaactaatttacactcccaccaacagtgtataagcacttctttctctctacaacctcaccagcatctgctgttttttgactttttaatgatcaccattctgactggtttgagatggtatctcactgtggttttgatttgcatttctttaatgatcaatgatgttgagcttttgtgtgtgtgtgtgattgttggtcttatgtacgtcttcttttgaaaagcgttcatgtcctttgcctactttttttttttttttttttttttgagacggagtctcgctctgttgcccaggctggagtgcagtggcgcaatctcggctcactgcaagctccgcctcccgggttcacgccattctcctgcctcagccctcctagtagttgggactacgggctcccgccacctcgcccggctaatttttttttgtatttttagtagagacggggtttcaccgtgttagccaggatggtctcgatttcctgacctcataatccgcccacctcggcctcccaaagtgctgggattacaggcttgagccaccacacccggccctttgcccactttttaatgaggttgtttgtttttttctttttgtaaatgttctttaagttccttatagatgctggatattagacctttgttggatgcatagtttgcaaaaattttcccctgttctgtaggctgtatgtttactctttgacagtttcttttgctgtgcagaagctctttagtttaattggatcccatttgtcaatttttgcttttgttgcaattgtttttggcatctttgtcatgaaatctttgcctgtgcctatatccagaatggtattgcctaggctgtcttccaggcttttatagttttaggttttaaaagtcgtcaatccatgttaagttagtttttgtatatggtgtaaggaaggggtccagtttcagtcttctgcatacagttagccagttatttcaggacaatttattgaatgggaaagcctttccccatgcttatttttgtcaggtttgtcaaagatctgatagttgtaggtgtaaagtcttatttctgggtgtagagcttgtgatttattctctgcatagccaatgcctgccagatggtagattctcaataaatgtttgttggttaaattgaagaaaaaagaattttacacttttcctatcttttttttaagtttttcaaatgcttccttctcattttagcttcactacatctgaagaggtcaaccctgacaatgtagttatgtttagaattttcaactgacttgtttacatatctttgtagaagtgtgttttcttgggcaaaagttggatgtttgtaaagaatttctttgccagtactgcctaagcaaataactgcgtactaaccctgtgtttctttctaaacagtacccactagttttgttagcgawcttcagatttacacgacacagggcttccgagtcatagcactggcctacaagaagctggaaaatgaccatcacgctactaccttgacgaggtaaatggggatgattttgataaagcagaaaggtttgatggaaagatgtaccaggttggaatgtcaagtgcattagactgggatggacttaggggttctgggtggtggacagagcaatgtagcttgctgaatttgtgtgcataacatgtctctgaacactggtaaatagggatatagtaatccctgccctgcctaaatcccaaagatagtgtgaacactcactgggggattttatgagaaatagtcatataagatgtttaatatgatgtgatttttacagctttgtgaaaacagacatagaaatataatcagcgtttcagaatttgaaattgtggtcatgcccccatttaaaaaaaattatagttggtggattggttgggaattatgaaacataacatttaccagaaaaaatttttgattggaaatacacagcttaatgaaacaaataaatacagcttagatgatataatcttggtgacatctacaaaaaaaacaaggaaaacttctgaggtgccatactagagaaagattttaacctatagattaaattttacattttaggattaaaatagagatgcgtaacagctccaaaactgcagtatttatgagttcaattttattttttttaattccactcttttcaggtatcatgtttatttcacctttcatgtcatttctaacacttaatgtcagccaccactgcttatgctgttacggagctaatctaggctcatttttaaatttaggattttacatttgggaagtctaacctatttgtttcaatctaatcagagtcaacactctcttgtaactatatttttgaactcaatattctaaaataaaattcacatattatctgcacatattctttgtaaaaatatataataacccattatatagtaagaatgaaagcaaaacatataatgtttcacacaggtgatagtttaataaatgctcagctgactccactaacacaaaatgaagtaacaagttgcttgtacctgtgtatagaataattgaggctgcaacatctacaaatacagactgatacaggtgtgttatgtattgcagactcaaatacctcagtcttgccgccagtaaggtgactgtgaagtggttaacaagtcttggtaaaactctgaaaaaaacagtacaatctcctcccaatttatatagtacaggtagttacatttctgcaaaattcaaaagaatataagtgtgaaaaatactttgtgtttatatgtaacacatataaactaggaaaattttaataaacaattttgtaattgtttaatataagataataatattatatatataataatagtmcagtatattctataataatagtaaaatatatacagtataagcctaaagtatattattatacttagaaaagtataataacttttttcagtgttcatgaatgtccagtaggatattcaaaagacatgtgtgatgcaggataattattcattgtgcattggtctttgcagaaagtcttgcatagatgcaaaaaaaaaaaaaaaaaaaaaattccacaatgtcctctagagggaggactgtttctgcttagaaggactgctgtgacccaactctctcactttgtgatgggtaaaatgaagcccactgtgggaagtggctcattgtgtttgtttcctgggcttgttggaccattcttcctgggggtccagtttcatgctacccctgaaactctggctactacaattctgtatatttgttgtaatttgatcaacttagttcagggtcactcaagtaagggagctaaaagtaaactttgagattggatatcacattttgaaggagaggcaacttgcgtccagggaagggaagggacagagcagaattgggaatggaacttggtttcctgacaggctgttgccaagggctatggtaagagtctggctaccatgctgctgcttctcattgtcataatatgatatttgcatattacaagttgcaaactcatggctttgaaatgcatgcacgtaacaaagcacttactgtggagacacatgagcaatggggaatagtgagggctgtggcgcgcaggagaggacatgtcctggttaaaggtactgaaattctaacttcttaaaatcttgtatggtctaaacacaaatcacaaattctcaactaggatttgatctcaggtcatcaatctgcctctcctgtcttaaagcacatcagcaccatgcatacacacagctaaattaatttaatgatcctttgtgaactcctgattaggatggaacattcttgctgttgttttggggtttttttctgtgtggttactcagggtgcttccagcattggtatcataatctcttcaaaggttattggcccacttcatgcatatttcatcctttaaaagtcacatggattttaagaacatgagatgtaatcacagggatgacaatgctttctatatattacacttaycattctttattatttttagatacttcaggaggaggcataatatctgtgcaggaagccagaagagatagaaagccattccaagtttcagggcttaagaccccttaaggaattactccttttaatttttttggttcagattaaatgctcatgaaaggaagaacttgtttaccagccaaagagagtgatttagtcatgctcacacagcaaggcagtggtagggctgacattagaactccagcctcctgattattgtgccttgaaccatacaaaggccataagccagaggaactagaaatactagtgccaatgtaggctataggctatggcagatgtttgaccctgcagccattttcttggcctaatctggcactttgtggttggctcaggtcatgtcttctgcagaaataaccaaggcctggggcctgagtaccaggaccatgagaaagattggaagacctattgtgccaaacccccatgcacttcaatagggaaggcaccaggttcaagaggctgaagaagagacccagagccagcaaaggaggcatggggttttattaggggctcacctacaggggagagagtcccgtaacagccggctggacaggagaaccaccttacatatagaaacagtccagtggcagcaaagtggacaacatatctgccttcctatactccagtggtggtgagctgtgcaggaaaaccgctgctgcctgcaaacatcatgcagtttgtatagtgttttcacttgactccttaatgacctccacccagcaaccttcatccacctcacaactcagggcctcagctccctttatggcctggcacatcttccactagatgggacgggggctcagaagttcctcagagacaaggaacagatctccgggttggccacggccagatttcctagcttggaacatacatttaggtgcgtctgccatagaggttcattctaagggtatgctaagtagttattgctatcaggtgcatttaccctataagccctcaatcaggcatcaaccaagttatccttcaaaccccagattaaatatcatcttctacagcaagccttctccaatcactccacccagaaatgagagcaccctcctctctgactccatgggactckgatttggacatctgttttaatacttttcccagtctctgctactacagtctctgcatattctctgccactttttctcagtgctgttccttgaactcagtaaaatttctggatgaggaatttccatagattacctggcaaaaaatggtcccaacaggcctcagagcatttcaactaggcacacatttgctgagcacttgctgtgtgttgggcaccgcatgagtggtgttgagcacagcattgaatcaggtgggattgttcccaaggagctgagacagtgtgacaaagcagaagcccaagaataaaacatgggcaaataaaatgtgagttacagtgaaatataagtaatatgacaagggagcaattattccttttctttttcttttcttttttttttttttgtgagacaggtttcatttttgttgcccaggctgaagtgcaatggtgtgatctcagctcactccacctcctggcttcaagcaattctcctgcctcagcctcccgagtagctgggattacaggcgcctggcaccatgcccaactaatgttgtatttttagtagggatgggatttctccatgttggtcaggctcgtctcgaactcccgacctcaggtgatccgtccacctcggcctcccaaagtgctgggattacaggcatgagccaccacgtctgtctgggagcaatgatttctatctgagggagcctttgtgggggacgtggtataaggctcagaacattgggagggtttcaatagcagatcatggggaaattacaaccttttctatgaagtaaggacaaatgtcttacagcagtctaaagcaaatgtctagagatggttaagtagacagaaaacccatggctagtggttcaacttggctggaaatgagggtgggtgaggagtttagtgatagctgaagctggaaagataatttggaaccagatcatagagggatttaaatgatagattcagaaaatgggaagtgccattctttcaagcctgctctgaggtgagtagttcaaactgtgtccacttcctgtggctccatggaggctttagcagtttcctgggagcatcactaacgctagttcatgactgtagctgatgtgagacccactattgagacaggcaaggagtctgagtgggtgccactttcatctgtatttcagccagagttaggcagtgctggtgtcttgttctcgatctgtgtctaagataaataaatgatggaagaatctttgaactcctgatcctgaatgtattccctgcactcagttctgtagaatatccctgaaaatattcttggggtggataggagccttgaaggctgcacctatttgcagaaacattcacgcttgatacagaagatcattgctaccagctggtggagaaagaaagggatgagctttacctgaatagagaggcctgtttgttgagattatgacctcatatctcctggggctaaaataatattgattatagacttgcctgctggagaaactggcattttattttatttttctttgcacctccgttttttttcatgctttgtgccagaactaaaactcccctttgtgggtaacaggtgaggcaatgaaaatcaggctagccacaacagatggaggagacccttacaggctttcagctcattttctgcaaaggttaaagcaaagcttttgcttaatgaacactctcttcctcttcctcttcattcagttagagttaaacatctccagagcctttgtgtccgcttctgttctctttctggatcactcccagtccctaatcagcccctaacagtgcttgaatgagtgaatggaaccactatgacaggggtctttttctttttgttttacttcctgtaagaaagctataatgtggctgggtgcrgtggctcacgcctgtaattccagcactttgggaagctgaggcgggtgaatcacttgaattcaggagttcaagaccagcctagccaacatggtgaaaccccgtatctattaaaaatacaaaaattagccgggcgtggtggtgggcacctataatcccagttacttgggaagctgaggcaggagaatgacttgaaccactgtcctccagcctggatgacagagcgagactccgtctcaaaaaaaaagctgtaatatgtgttatttctgttcaatacatctatatatgtattttcagggagacggtagaatcagacctgatatttctggggctgctgatcttggagaatcgattgaaggaagagacaaaacctgtcttggaagagctcatctcagcccggataaggactgtaatgatcacaggtatgaaacaaagtatacagtgaaaacagtaagaatttgatgtggaaatagacatggttcactcatttaataaatgttgttgactacctactctgggccagacatcattccaggtgctggagatgggcaacaaaaaggcacatttactgctttccctgagtttccatgtgagtggaatgagagaagatcaaccaatcagtcaaatagtatcagcgttttgaggtacacaaataggataatgcaggaaagtgtttgaccatctgttttagatgagatggttaagagatgcctctccgagatgtgacatttgaaataagatctgaatggcaagaagacatgagtcaggcaaaggtgatttttattgtcaagtgctagaagaagaagcatcctcagttgatggggtctataaatatgctgaaaacccatcaatcataaaatccacgattctagaaatttaagaaaatgatgtcctctctactcccaatcccaactccaaatcatacaaacaagagagcaatgagagtaaatcacacaagagaaatgtgtgaaatttcttaatgaaattaagtgtgactttattaatgaaatttcacactgatgctataattttttaattgggaaagagacgaggtgaataaatgatttcctaatgaattcatgttcatatttttggggtgtgttgcctttcttttccctgctcttgtagtcagatgcttttaactctatcatttatgtcacgaagatacattatttccccatcaaagcacgcattttctgttcccatttcacctgaacccaattctacagttgcaaactctagaatacttttatttcctcttttgtacttctctgtcccctgttctactccccacaatmcaagaggatcttggactgtttttactttctccctttctaacaccccagtccaactttttgaagttgctgagttcatttactactggttaggatttcccttacactgtgacccttctgtttcaaaaatctttatttagcacttagatgacacattctcataatctatccttaacttagatttatgtacaagtgttcctccttctccaccctctctctttacttcctcttttctcatattgaaatttctgccgtatttctttccttgcttgtttacaaatttttttcgctgaagtattgyccttggatggaatgaaggggtgctcttagatttcttacatatgcttgaatatctttctttgctctgacacatgaatgacatcttgctcagatataagattcttgaattattgttcttttttcttaatgatctgtatgtaggggctattcctttgccttgtggcttctgatattgctcatgacaagtccagtgagagtccactgtaagtaacttactcttttctgcacataaactttttaactttgaaatttagaaatgtttgcctttgtgtttcccttatttcattaacttagtctggaacatggacagcrcttttagaaaaatttttatttttattttttaccattttttgacatatttattaagtcatcataatatctgtcactttgaatgttatacatatgataaaacagattatgaaaagtatcatatttatagcaagaacattggtttatataactgaatcaccaaatacgcaaccccttgtgacaataacttaatggactcaactctatcctctgaatggaccagttttatgatgattcattcacttaaaaagttttgaattgattagaatttcttgttgcttctttctgtgacccaaggccttagaatcaatccctggaaaccagtgatcagaaccagacttccccagaatcaagaagagatcggagtgggagaaacatggacagcactttttagtctttcttcctaccagaaaagatttccctattgtttatttaatttttgcctctgttctctgtctytccatttttacttctggtagttccattgttatctatcctctcagtctatcttttttcttgtagttgtcttatttatttgtttgtttatttacttattttttagagacagagtcttgctctcttgyccaggctagagtgcagtggcaggatcatagctcacttcagccttgaactcctgggctcaagcgatcctcctgcctaagccttcttagtaactgggactgcaggcatgcaccacttgccttgctttagattgtatctttttataattttgctttaagacttttttttttttgcacccagtttgttcagaccacaatctcaggtctcaacaatgctcattatctttttcaaatccccttttgaatcgttcagttgttaaattgtgtgtggggtgggatttgagttttcttaagttgaatcgttcagttcttaaatcgtgtgtggggtgggatttgagttttcttaagtgctctccttatttattttttatttatttgtattttttgagatagagtcttgctctgtcaccaggctggagtgcagtgacctgatctcggctcagtgcaacctccgactaccgggttcaagcgattctcctgcttcagcctcccgagtagctgggactacaggtgtgcaccaccacgcccagctaatttttgtatttttagtagagatagggtttcaccatgttggccaggatggtcttgaacttctgacctcaggtgatcctaccaccttggcctcccaaagtgctgggattataggcatgagtccccacgcccagccagtgctttatttatttatttattttttatatatttttttgagacagagtctcactgtcttgccagggctggagtgcagtggtgcgatctcggctcgctgcaacctccgcctcctgggttcaagtgattctcctgcctcagcctcccaagtagctgggattacaggcacgcaacacaacgcctggctaatttttatatttttagtagagacagggtttcaccatgttggccaggattgtcttgatctcttgacctcgtgatctgtgtgcctcggcctcccaaagtgctgggactacaggtgtgagccactgcgcctggccagtgctstccttatttttaaagcaggtttcatctgtctccggcagcttcttgacttctctagtcatgtgctctggttgttcctcctgatcttttcctgtccagtgtctcggatttcttagacaggttgttagatttttctgtcagatgattggagctcaggcctgggctgtttatcccgaacactggatctctgacaggtggtagagggcaaaaagcagacaggctgtcaggggcctgctgtggagcatggaggaagcctatgagcgctcagggctccctgtatccttccagcctcaggtagctccttcctaccacttcggctcttttgaggatcttcatacatagtttggtagaaacctgggagaagctatgttaaggatagccagccagatgttatatgattaatttttaatggttgctctaggcatcacaacatacatacctctcctttcaagaagccttataaccaggaatgtctcttgctttctcttctttatgttattatcgtcataactatgacatatgttgaaaacccccaccagatgatgtgatagtctttactttcaacagggaagagttaaagaacatgagtaaagaaaattagacttttatatttacccagatcattatcatttctgtttctgtgttttcattccttaagttacaagttaacatctggtatcatttcctttcaacctgaagaaccctgtagcktttgttgttgtttattttttgagcatgtccactgtcaacaaattatcttcaattttcattcatctgataaagtctttatttctcctttattcatgaagaatatttttagaagctataggagtcagagttgacacttcaaagtgaaagatgaagtcagcacctcaaagatgttgttccactattttcttctctccatatttttgatggaaatctgtgataatttgaagtattgttttcttatatgtaatgtggttttctctaactgctttttttgtttatctttgatttttagcagtttgattactatatgtctggttgtgattctcactaagtttatcttgtttggaattcactgagcttcttgaatctgtaaatctaagtcttttatcatacttgggaaaatttctcctattattttgtcaatttttttttctttttcaaccttttttcctctccttggactctaatgacatgaatatgaattattttggtatctttgagtctgttcactaaaacgattttttctctctgctcttcaggttgtgtaatttccattgatctattctgctattgagtacattcagtgatttttttaaatttcaggtattatattttttaattctaaagtatccatttggttttttcccacagtttatattttcttgttgagaacttccgtctttccacttatttcaagaatattaacagttaccacatgaagggggcttttaatagctgctttaaaaaccattgtctgatacttccaacatctaggctatctatggattggcaactgttgtggcttttcttgagaattgaccagattttccagatttttcatattgaatatcccgaacattttgaatattatgttaygaaactttgaatcctgttaaaatcttctggagaatgttgagagttttcttgtttgtttgttttgggctagcaatcaaccataagttctatctttcctgttgtaggtggcagtttcaatcttagctaaaatataaaatcttttgctatgatgtttgggtctgcctcactcagaggttactctcacaaacgaggggtgatttatatcatagttcaattcctgaagtttttggggttatctttctttggatctggtccacacacgcacagctctaggctgaacttgggacttacgtaattcatatactgaattagtccctgtgtctggctctctcctttccaggattccgcccatgccctttagcctacaagggtcccttttcctggctcttctggccagaaagactgggtgtcttttggagttctactgcccaaacagctttttaactgaggcccacacgccagtcaaatatggaatagggaagagaaaaagtgctgagaaactcatccccttgtaggttgcttctccaaatttgactccctcccaccatctgcctgcttttgtttacttttcaaagtccttggggagttgcttcttggtttttgttcagagttttccattgtaatcagtgggagagatacatcctagtgggtttactccattttgcctggaagtggaaccaccagatactctactaaaccagaggatttgcctaaacatttgcaaagctgctaacaaatgatgaaaatagatttgaattttgctttttawttttttcccccagtctggcaaaaatacactggtagatcatgaagcaacctgacgaaaagcagtaagaaccagaaaagggatcatggagtcacagaaggtcagggctgaaawagatatcagagatcatttctcttcatacctgaaataaggactgaactccctgctctggttttcaaggctctgcatgaattaattcaatcttgtcaacctcatcttgagatactcctcctttcctctaggtgacaatcttcagactgcaataacagtggccagaaaatctggaatggtttctgaaagccagaaagtcattctcattgaggcaaatgaaaccaccgggtcctcatcagcatctatatcttggacgttagtagaagagaagaaacacattatgtatgggaatcaggtactcctgaacacagaccttctgccacattatcartgtgtcttgcagtgttggtgactgagcagctttgacctagagtcaacatatgcttccaaatgtctagcattcatgcttttgaacgaactcagttacattggtttttccatacttttcatacagagattgaaggtatagtgctttcctgtgtgctggaaataatccatcttttaaccttaaaaaagtggttgtccctatatgagaaagaatatagtgcgtggagttgaatctattttctccctttccccttgcttgtcaatcaccccactgggttctaaggggatctagtctttgggagagatgctgctctgtgtatcagaaaatcagactatgttttcagggtgagaaaaaagtttcattcatttatctccagtcttgtcagtattctatctctgttgtgtccttgtagaacaatattagttccctaaggacaaaaaaatagtaagttctcatttcagggagaaatttgttaagctgcagtgcttttgtattttacacttgatatgtgtgaaatgtgctcttctctgggactcaccaagatcaaatcacgatgaaaacaggacatgagtaagtgttattctcctattcactggttgtctgtgatgtgcaaagattgatccagcaaaaagaaaatgcttctctgaggaatcagagtgacttttacagatagatcctggtctgtcttcattaacttctytcagatatgcttatggttctaaccactctrtcaaatgaaagagtctaaaataactgtgtcttgctttgtaggacaattacattaacatcagggatgaagtctctgataaaggcagagaaggaagttaccattttgccctaactggaaaatcctttcatgttataagtcaacatttcagcagcctactgccaaaggtaagttctaagagggtgacaatctccctatgaaaatgctgatgatgtcacttacagaacatggtcctaaattatttcaaatcttgagacaggtaaaatatactcagtgagttttctgtatcttaagagagacagatatttttgcagaagatactattgtctcatttcctactagatttgaaataaataaacttgattagtcaattttccaccatctataggattgaagtatcagtgatttcttgaattatacagatgattttgggtggctgtcactatattgccatggtaaggggtctcagagtatagtggaaaccctgcaattacacaggaaagcagaccaagaataaaggaacaccattagttttttgatagatgacctctgtactcaagagggtcaaacttaaagctttagtcgggggagktaagttttagwtatatatatatakakakagagagagagakagatcgatagtttagatatatagatcaaccttttgctgttttgcagttcaaggttccattaagctcaagatttttcaggaccacattccccgtgacagctgaggtaaattcctgtaggtcatcattttcataaaatattttttgttaagtaattatctttactgatttttgtttttcactgatcacttatctgatgaccaaaacctcaatgtttgtcttaaaatccaaaggaaggctcattggaaacttttttttttcttcatcgtaagtgtcatgatgcagtcaacattctgagtgttagtaattatttyatgtacaaccagatgacttgataaaaaaatctccattttgggttccttacagatattgatcaatgggaccatctttgcaagaatgtctcctgggcagaagtccagtctggtggaagaatttcagaaactggagtaggttctttgccagtgcaggtggcatgaactgcatggaggcataacagtcagggggagtggaagaggtaccaggagtcactcagtttgacaagggcagtggtccgtacttcggctgcatgagataatcacttgggagctttggagaaaatagcagtaccaagggatctcaccattcagagatcctgattcagttgtttatatggggcttaaaaaatcagtattttttttcacttaagtcaattttgcattcaatgctgagaaccactggactagaacctaagggtcctgaaagagtgtggggagaaataagaatggaaaggtggcttgagctcagctcctggagggacagtgagaatttatttgtatatgccgtcatcacaatgatgatatagggatattcatatgacaagagattcatgyaacattaaaaatactaaaatacttgtgtgccaaagcatttttccaccctaaatcagaaaaatcattctcttctaacacaaagggtctccattcctagacagaatgggcagtccaaatgaagtgcccatcgcttaggaccctttgtttcctgttaatagaaccccacagagtaccagaggctttctccatcttggtcatcgtgtcacaacaacatgactccgactcctacttgtttctgctctgccctcctattcatttgattccgttatcaggctagcttctcagctcagaaagccctatcttctcaacatggctgaaacctagagagtcaacgagttccctccatatggcagtgtggaagaaaagtatagcatgttttatgaatgctgtcagaatgctcataatttaaaaagttggctctcaatagtccttgtcaatgattcaagagagtattcacccagcctcaaaaagtcattctgaaacaaggatgtgttttctttcttcaacttctaggcctggcattacatacttgagttgagtgactgttgacaggatggatttcctctcatgctagtattaacagcacaaacaactatgacttgttatcattttagactttataagtactttcccatacagcacctcatttaatactcatagcccttcgtagcaaaataataataatgatgggaataataataatagtgaaaatgttaagatgaccaggtcaacatctgcatctggtttcaaatcctgtgccctctctgccatgccaaacttacatcatwgaattgtragcacctctgtcttacagctgagaaaactctccctacgcagtgatgtgcagtgtctacatgaaacacttacagtcaggaatcacgttctgaatttctaaatccattgtattaactgctgaatcacacttttttcagtcaaactagactcttaggaaaattcscttaaataatgagtttgaaccctaagtaatgatggttactttgtttttttaattagagaaattagcaagataggtttgatctcatctacaattaatgtggttccctcttagttactttgtaggtatgtgtggtgatggagccaatgactgtggggtaagtagctaccagtttgtgtggccataatctcacattcgattacacttaagccctttagagtagctgccagtgtgtgtagtcataatctcacattcatttatactcgagccctttagaggtatactcctggcatatataccatttacattcctcttgacggataaactgttgcattgggaggcttttgaccaaagtcacacgattcaatggttagttcaggctacacagagtagaatttggttctggagttctcatttctttggctaggtatcctaatgccatctttttctcatgttccaggcagggttaagtctcttggttagagtttgggcacacaaaccaccttgtggccagcttaactggccttttcttatgaggctttagtagagacgtacgtgagtctatgtgaggagtaagctgattctttgctttcaggctctgaaaatggctcatgtgggcatctcattatcagagcaggaggcatctgtggcctcacctttcacttccaaaactccaaacattgagtgcgtacctcaccttatcaagtaagtaggcacttcctcaaacattgttttctctctcttgacttctggtgcaamtcacattgttctgcctgggaaagactagagaaactttctgtccctgggtgcggagggtgttttgtggaagaatgcagtcaagcattctacttccaaatggattttccagaagttaacaataacattgggagagcagtggcatttccagtgaattcactgattaggttatttttagaagattggaatctggaacttgttattgctttgaaagtgtcaatcatccccatttttcaaatgtaactatctccttttcaatttttatttgaaaaataaagttttcaaaatctttggccgggcgcagtggctcacgcctgtaatcccagcactttgggaggccgaggtgggcagatcacgaggtcaggagattgagaccatcctggctaacatggtgaaacgccgtttctactaaaaataccaaaaaattagctgggcgtggtagcaggctcctgcagtcccagctacttgggaggctgaggcaggagaatggtgtgaacctgggaggtggagattgcagtgagccaagattgtgccactgcactccagcctgggcaacagagcaagtctctgtctcaaaaaaaaaaaaaaaaaaaaaaaatctttattggcttttgctgctctcactaaaatttgctttgatgtcccccaccaccctgccgaaaatgtacttctgctccattatatttgaatgatagagatagtragcatggtggctgctcttggttattgtaactgacatgtgtttctagtttaaaaatgctataatgcctactatctcacacttcaaaacagcctggagatgcaggaatggctatttttttaacaaacmaaacaattgaagttcagaaaatttaattgatgtgcccaagctcatacaaccatatgaggttagagattgtcttagaattaattttattcaaatgtattttatctacagatatactatttccaccacataaaaataataatttggctaggtcctcccaattttttatttattcatgcatttgacaaatctttagtgagtaggcatttagtgccagaaactaagggagataaggatgatacctactgattttgataggtgctgtccaggaaataaaaagggtaaaagggaataagatggctatataggtggaagcagctgcttcagatggggtggtatgggaaaacctctctaaggagaacctctccttattgcttagagaacctctctaagcaataaggagaaactacctctgggcagaggaaatgtcacggcaaaactctgatacagaaaaaaacctggtttgaggatcaggtttttttttttttttttttgagacggagtctcactctgtcgcccaggctggagtgcagtggcgggatctcggctcactgcaagctccgcctcccgggttcacgccattctcctgcctcagcctcccaagtagctgggactacaggcgcccgccaccacgcccggctaattttttgctttttagtagagacggggtttcgccgttttagccgggatggtctcgatctcctgacctcgtgatccgcccgcctcggcctcccaaaaaactggtgannnnnnnnnnnnnnnnnnnnnnnnnnnnnnnnnnnnnnnnnnnnnnnnnnnnnnnnnnnnnnnnnnnnnnnnnnnnnnnnnnnnnnnnnnnnnnnnnnnnnnnnnnnnnnnnnnnnnnnnnnnnnnnnnnnnnnnnnnnnnnnnnnnnnnnnnnnnnnnnnnnnnnnnaaaaaaaaattagctagacctggtggagcatgcctgttgtcccagctactcaggaggctgaggcgggcgaatcacttgaacctggtaggcagaggttgcagtgagctgacatcatgccactgcactccagcctgggtgactaagcaagattctgacaaaaaaaaaagtataatttaaatttaaaaagtgtaacttaaactttatttttcaccgaatgaaatagaagataaaagtgacatttcatgtgtcatctatttcatgctttaaatgtgtactatttattcaaatcaatcaacaataacacaaatgaaaatgctcatcatttccagcctatttcaatttgatatatgactaatttgagtgtgtattgttttggtccagttttagaaaaagttgggactgccaaaatgaaatttgaatcaaatgcttgccaagctcctgaagctcctgtatgaaaataacccctgaatctggaattttatttaaatccattagttcacagatgaagaaactgagacaagggaaatgatcttctgcatctcattagtgaataggtagaagatctggcactagctccactgatctgagttcaggagctaaaacaatgcctgctgaaaggacaagagcaactgtaaatctggactccatcaccagatcaaggcccttggaccttggcctggaattggcctttcttgaaaattgggttgtgtagtttactgacagccagcatccatgagctcagggctgtccattttcagacagacagtcgtataatgacttttgattttttttctcctgagcttagctgaacagcacagaatgactgaccttatgtcttttcattactttcrtgtctttatcatttcttttcttacacagggaaggacgtgcagctctcgttacctccttttgcatgtttaagtacatggctctgtacagcatgattcagtatgttggtgttctgctgctctactgggtatgacttgggacttagcctcttggttagtgtgaactaaaacaagtagcggtgcactctcaatttacaatgcctctcaaagaaagwgtacaaataggatatctgaacaacaacagcccctccaaaaatatccttaagaatttgtaaagtaaatcacaaatagacagatttgtacaggaaaagttgctgatgtcaattctctgatgtagaaaccttttatctagtaatagctgaaatcaccactgaatatattgctgctacttttacctgattggacaaggtctttatcttcttaattgcaacgtggctctaccctagtctaccactcactaaagaaatggttctctgcattggggtgttgctaaatgcttcatttagcatgaaaaaaaagacctgattattaatgtttgcccatttcagtggcgtaaatactcctaccataaccagttgcaagctgtctgcctattgtcactgaacatgaagtggggaaagatgtatagtagcatatgattctataatacttgycccatatagatacaagagtcgtaaataaccttaagggcagagatagcagtaaaatgtagaaaaatatttagaaatagctgagctttgagtatttattaactttggttttagtataatttatttaatggtacacttgtataatttaagtttttgtattggctttgtttaacaaccagctcacaacatctctgaaaatttagcaattgacttttaagtgttagtataagccagcatgccactggttccctgaatatagggatgtgaaaactggcatatcataccacaaaaatacataggtcttgtgatcacttttttttgtttaccaagatataaaaagagaaaaaaacatgcacatcatctgtgaactcaacatgtgagattaccgtattaaccaacaccaaggaaagaaagttcgtctggatatctgtgtggcagatatccagattcatctttatatactgccttctttttcctgggttaaagattttagttctattgctctcagataaactatatcttttcctactcactgataaatgggctagagaaggataggctatttctggaaattggcctctattttagaattcccaaattatactcaaaagtagaattaaacattgaacattatctcctttccactaaggggtggggagcaagaaagtgagtgagtttcttaaaatcagtaagacatagcactttttcctctagactattaagatgttttgctaggattttctaaaattttgtctaaaaacattcaagaatgcaaatagtgagtttacttattcttattttccatcagtaaaacttatgtaaggttaccacacatttgtcacttggggatgtatttttttattgtgtgaaatgaaatcctaaattttctgttaacaagtagaaaagagagcagagatgaatctggtaggggaagatgtcctcctcaacaaagtaataaggatgcacaaacaatcccaccctgaaagcacatgatgataggccccctgcatagagagggtttcacaggtttggctttgattacttccaccaacaccatcactcaccaactcaaccaggccccgaacacagcatctccacagtaatttacttgaaaaaccctatgtcacagtgagaaaataaatgtaatcaatatctaatttcatccagaaggtcacaacttttttgatctgctttctttttattttcaggagacaaacagcctttcaaattaccagtttctgttccaggatctggccattacaactcttattggtgtaacaagtaagacattttaaaactttcttaccagaggtgctaccctcagctgccctccctctgccttggaaagatttgtctaccatgaggaacagcagctgcaacagcagcaatgatctggaatttattcccaaatatatacacagagaggaaatagaatcctcatttttaagtattgcaagaaagtattagcaaaagaaaagcttgctcgttattttgctgttttctgcaaaatgtggaacttctataaatggtcactaaacacttaaaatgaaaaaagcagcttgaaaatcaggaacactaacttcagagtgcttttagatacagttatagttaaaatgtacccaatttataggagccaaatggcttttatatttctcatacctaaatcttagcctctcaggatttagaatgaagcttaaaggtaatcttgccattatacctctcttaccctccaccttctaatgaataaattgtctccctaatgttcctgcaatggaaaatttttttatttttgactttattcttttttagggctgtcttaggttcacaacaaaaatgagaggaaggtacagagatttcccatgtacttccttcccaaacacatacatagcctctgctactatcagcgttcctcacaaagtggtatatttgttgtaactgatgaaattctattgatgaatgattgaagttttgacatgtctttgttgttttgcttttgtcttactagctcagctaaaggaaaatctcaaccaacattcatgttgaaactaattcagtcatcaattgcaatcataggttgattatggacacaagagtttggcaaaactcaatgaaagcatttcgtgagaaacaattaataataacatcattattatccaaagtccatmgtttacattacagttcattcctggtcttgcacattttatgggtttgaacatatgtataatgacatgtatccatcattatattatcacacagaatattttcactgccctaaaaatcctctgctctgcctagtcatcttccccacttccccaaagctcctggcaaccactgtgatcttttacggtctcagtagttttggcctttcttttcttttctttttttttattattatactttaagttctagggtacatgtgcacaacatgcaggtttgtttggcttttctagaatgttatatagttggaatcatatataggcttttcagatgggcttttcttcacttagtaatatgcatttaaggttcaactatgtcttttcatagtttgatagttcatttctttttagtgctgaataatactccattgtctgtatgtaccacagttgatttattcattcacctaccgaaggatatcttagttgcttccaagtttgggcaactgtaaataaagctgctataaacatccgtgtgcagatttttgagtggaaataagttttcattttcactgggtaaaggattatgtagtaagaataagttttgttttgtaagaaacctctaaactgtctttccaaacagctatactagtttgcatttctactaccaatgatttagagtccttgttgcttcacatactcaccagcatttagtattgttagtgttctggattttggccattctaataggtttgtagtggttccatttatgcttttactcctacttcctccaaccttctcaaggattttattcgtctaataatctatttctccattattatcttgtttactagatcattcccaatgatggcatataatacattctcatatcttctttcttttaaaaattcttatttgaccctgaatctaccaccagctactgcctcctttattcttaaacttcccaaacagttatgtatacccactttctccattctcatccctaattctactaccattccatttccattagccagattctaacatccaggggcatgaatttgaattttgggcttatgcagttgttcagtaggaggcagtggtatacttgcaaatggttaacatgttgctccccaaaacagtttgaatatacatatatatttacttgttttcatatatataatggaaacatatatatatatgggaaacatatatatgtgtgtatatataaatatatatagaaacatatatatgtgtgtatatataaatgtatatatacccacatatacacatacacacccrtatatatttggaagcatatttatatatagtaaacacacacacacacacacacacacatgcatatatagaaacaagtaactttactgaaaagaaatgtgtagtgagcaatttgcaaatatacttgttctctaacttttggagtatttcaagtcttgttcttggatccgctgtcttttcagcctataccatctccataagtaatctcaaccagccccatgactttaatattatctatctgctgatgaatcccaaatttatatctccagccttgatgtccatccaaagctctggaaatgtagctactctgcatctaaccatgggtatttaataggaattaaacwgaactcaaacattctcaaacagaactcttaattcccccagatctgatattcaatataatcattatgtacttactgagtccctagtttgtgctacttactgatctaggaacttagaataatacatcagtgaaacaaaacaagatttctttccttatggagcttacattctactggaattgcactgttatctacctagttgttcaagtcaaataactagagtcatcctttatttttcttgtttcttcacccatcacatcctatacatttgaaatttctgttagcactgcctccaaaacgtactgtgattccccccctccattttcaatgtagccgccatcattagtcactaagcaatgccagctcccttgtgcattactgtaacaactttatagctgatcttgcttccactgttgctgccctctcctcattcccatttacacaatagtaagagtattgtttttaaatataaattttattattcattctcttgcttaaaatgctccaatgcttcccattttgactcaattcaagtcttatatgattgggctcctgactacttcaccaacttcacctctacccacattgccactcactgatgtgactgctgtactggtcttactgtctctagtacattgtcaagctgtggtcaactcaagtacccttgcattggctattccttttgcctaaaatactctccccttggatctttatatgtctttgacttttttcattattcatatttgagctcaaatgtcacttcttcagaaagatcactttaatagtgaagaagccagttctctatcacacaaccctgctttatgttttcacagtactttccacaatctgaagttactatatttatctttgttttcattagctttttgcctgcttctcctcacccagaatgtgtgtttcatgagaacaacatttagtctgtattgatccatgctgtaatcccaatacttctgacatattaaaggagcttgttaaatatttgttaaatctattgaaagaacaacctcgtacaggctttgttaactttgtcagcagagttccccttcacacgaagccaaatttatctctaaatgtgtaactttcatccatcccagttttgccatttgaggtgtcacagaagagtttaattttttctccagaacagtccttctgtttgaaatttatttcgaacagaaaattctatttgaaagaatttggaarcagctyttatttattctgtgattgttctcttctccatagcaagtgcctttaggattttctctattttttgttaaacaacttgattcttttctgtttaacatatattaagtgtatatgttgttaacatatattcactgtgaaagatggaaaacatttcaagatataacagagaaaaacctatttttatcttactatccagagctaaccaattaaagcattttgatgtatttctgtccagtcttttttctatataaattaagaaattagaattatgtcttctatatagtgcatcttattttcattttaatttttttcttgtggtaaaattatataacaaaatttgtcatttttatttttttctgtgtataatttagggacatgaattacattcacaatgttttcaatcatcaccactatatattttcaaaagtttttcatcacctcaaacagatactctatccattaaagcaataactccccatcctttctccctccaacccatggttaactctaatctattttttgtctctatgaatttccctattcaatatatttcatataaatgaagtcaggcagtttgtaccattgtatctggtttctttagtataatccattttgtaacatgcatcagaacttaattcgtttttatagctgaataatattccattatatgtatataccacattttatctatccatttatttgttgatggacttgggtgctcccacctgttggctgttgtgaataatgctgcaatgaacatttgcataaaatatctttttgagtccctgttttcaactcttttgggtataaagtggaatctgggtcatatgttaatcatatatttaacttttcaaggaaccaccgaactattttcctaatgactgcatcattttacattctcactagcaatgtataaggggtctaattgcttcacagcctcatcagctcttgttatttaatggacaaagattattttaaccatcctaataggtttggagtgatatcttattatgattttgacttgcatttctctaatgactaataatagtgaacatatagtcatgtgctcatgarccatttacatgtcttctttggagaaatgtttattcaggtcctttgaccatttcctaattgaatttttgtcttctgggttttattattattattattataccttaagttctagggtacatgtgcacaacgtgaaggtttgttacatatgtatacatgtgccatgttggtgagctgcccccattaactcgtcctttacattaggtatatctcctaatgctatccctcccccctccccccaccccacgacaggcctaggtgtgtgatgttccccttcctgtgtccaagagttctcattgttcaattcccacctataagtgagaacacgcggtgcttggttttttgtccctgcaatagtttgctgagaatgatggtttccagcttcatccatgtctctacaaaggacgtgaactcatccttttttatggctgcatagtattccatggtatatatgtgccacattttcttaatccagtctatcattgttggacatttgtgttggttccaagtctttgctattgtgaatagtgccacaataaacatacatgtgcatgtgtctttgtagcagcatgatttataatcctttgggtatatacccagtaatgggatggctgggtcaaatggtatttctagttctggatccttgaggaatcaccacactgtcttccacaatggttgaaccagtttacagtcccaccaacagtgtaaaagtgttcctgtttctccacatcctctccaacacctgttgtttcctgactttctaattatcaccattgtaactggtgtgagatggtatctcactgtggttttgatttgcatttctctgatggccagtgatgatgagcattttttcatgtgtcttttggctgcataaatgtcttcttttgagaagtgtctgttcatatcctttgcccactttttaatggggttgtttgtttttttcttgtaaatttgtttgagttctttgtagattctggatattagccctttgtcagatgagtagattgcaaaaattttctcccattgtataggttgcctgttcactctaatggtagtttcttttgctgtgtagaagctgttttgtttaattagatcccatttgttaattttggcttttgttgccattgcttttgttgttttagacatgaagtccttgcccatgcctatgtccggaatggtattgcctaggttttcttctagggtttttatggttttaggtctaacatttaagtctttaatccatcttgaattaatttttgtataaggtgtaaggaagggatccagtttcagctttctacatatggctagccagttttcccagcaccatttattaaatagggaatcatttccccatttcttgtttttgtcaggtttgtcaaagatcagatggttgtagatgtgtggtattctttctgagggttctgttctgttccattggtctatatctctgtaccatgctcttttggtgactgtagccttgtagtacagtttgaagtcagatagtgtgatgcctccagctttgttcttttggcttaagattgtcttggcaatgtgggctcttttttggttacatatgaactttaaagtagtttcttccaattctatgaagaaagtcattggtagcttgatgtggatggcattgaatctataaattaccttgggcagtatggccattttcatgatattgattcttcctatccatgaggatggaatgttttccatttgtttgtgtcctcttttatttcgttgagcagtggtttgtagttcttcttgaagagatccttcacatcccttgtaagttggattcctaggtattttattctctttgaagcaattgtgaatgggagttcactcatgatttggctgtttctctgttagtggtgtataagaatgcttgtgatttktgcacattgagttctagcagttcttcatatattgtggagattaaactcttatgagacatgaaatcacaaatattttctcctatatgttatcttttcactttttaaataatgtccaagttttttattttaatggagtcctatttatttatttatgtatttgtttgttcatgtatttggtgttatatctaagaatccaatgccaaattcaaggttatgaatatttctccctaagtttcttctaagtattttatgttgttaactcttacatttaggtcattgatccattttttgtgttaatttttacatgtggtatgaagtagaggtccaagttccttactttgtgtgtggaaatctggttgtcccagcttgttgaagagactattctttccttcattaaatggtattaatatgcattttgaaatcagttggccatagatgtatgggcttattgctggaccctcaattctattccattggtctacatgtatttcctcatgttagcaccgaactggtttkgttactgagtttggatttgggaagtgtgagtccttcaatgctatttttcttttcaagatttttagaaacgatttagggactcttataatttcatataaatctgaggactgactccatttctctaaaaatagctatttaaattttgatagagattgcatcaaatctgtagatcactttggatagtacaaacatcttaataatattgagtcttccaatccattaatatgagattttaatgggtttttccatttatttgtgtcatctttaatttctttcaacaaagttttgtagttttcagtgtggaagcctttctctttcttggttaagtttatctctaggtatttcattttttggaaatagartttttttaagtttgtctttgaattgttcactgctggtgtacagaaacacgatgattgtttttgtgttgatcttatgccctgaaacattgctgtattcaattattaattttatcagctttcttgtgagtttcttaagattttcagtatgtaggctcttgtcatcagtgcatagagatggttttacttctttcttccaattggatgattttatttcctttttcttttyaaaagatacaacttatttttaattaacacatatttgtacatatttatgaggtacaatgtgatgtttcaatacatgtatacgttgtgtaatagtaaaatcatggtaattagcatatttatcactttgcacatttatcattttttgtagtgagaacattcagaattctcttttttagcaattttgaaatataaagtctgctattgttaatgataatcatcctactatgcaatagaacaatagaasttattcctcctattgaactataactttgtacatactgacaaccttctctccatccccttctcctctctatctctattctttccagccttaagaaaccactattctactctctacttctatgagatcaactttttttgattctacaaatgagtgaggtcatgtggaatttgtccttctgtgtctggcttcttccacttagcacagtgtcctcaagcttcatctatgttgttgcaatcaacaagatttccttgtttttttaaggctcaatagtattccatcgtgtataccacatgttctttattcattcacctgttgatatacccttagggcaattccatgttttggctattatgaatagggcttcaataaacacgggagtgcagatatttctttgacatactgatgttattttctttggatacatacccagtagtgggattgctagatcatatggtagttccatttttaatttttaagggaacctccatgctattttctttaatggctgtattaatttacatttcgaccaacagtatgtaagtgttctcttttctttacattctcactaatatttattattttttgtctttttgataatagctgttctaactggagtgagattatatctcackgtggttttgatttgcatttccctgatattaatgatgttgaacattttttcatatatctgttggcatatggcatacctatttctatggtttttttggagaaatgtcttgtcaggtattttttccattttttaattgaattattttattattatttttgctattgagtttttttttgagttcctgatataatctggatattaatcccttgtcaggggctattttattatactgcatagtttagaaatattttctcccattatgtaggttgtctcttcaatctgttaactgtttcctttgttgtgcaaaatctttttagttttatgtaatccccatttgtctatttttgcttttgttgcctatgcttttagggttttagcaaaaaaattattgcccaaatcaaaaccatgaaacatttttcatatgtttytgtttagcagttttatagtttcgagttttacatttaagtttttaatccactttgagttaatkttcttatttggtgagagataggggtctagttcattcttctgcatcgataaccaattttctcagcaccattcattgaggagacggtgctttccctaatgtgtgttctttgcacctttgtgaaaatcaattgactgtagatgtttttatttctggaatctctattctgtcccattggtctatgtgtctattttataccaataccaagctgttttagttactgtagttttgtagtatattttaaaatcaaggatatgtggggcctctggcattattctttttgctgaagagtgctttggttattcaaggtcttttgtggtccctatacattttaggatttttttttctatttctgtgaaaaatktctttggtgttttgatagagattggattgaatctgtagattgttttaggtagcagggatatttcaacaatattaattcttccaatcaattaacatgggatgtcttttcatgtatgtgtgttagcttccattttttttcaccagtgttttatagtttccagtatagagatttttcacctccttggttaaatttatttctaggcatcttattttttgtgktgtagctgttgaaagtggcattgtcttctttatttcttttatagataattcatcattagcctatataaaagctactgatttttctatgttgattttgggttctaaagatttactgaatttatktattagttctgttagttttctggtggagtctttagggttatctatgtataagagcatgccaccaccaaacagggacaatttgactttctccttcccaatttgaatgtctgtttttttttctcttgcctagttgctctggctaggacttccagtactatgttgaatagaagtggcaaaagtgggcatccttttcttgttccagattttaaaggaaaagcttttaacttttccccgttagtatgatgtgagttgtggatttgtcatacatgacctttattgcattgaggtgcatttcttctatgcttaatttgttcagagtttttagcagaagggaattttgaatattgttaaatgcttatctattgaaatgattatatggtttttgtccatcctattgatgtaatgtatcatgtttattgatttgaatatgttgaaccatccttgcatcttggggtgaatcccacttgatcatggtgaattacctttttaatgtgttgttaaattcagtttgctagtattttgctgaggatttttttttacatctatatttactagaaatattggcccttttttattgtgtccttgtagtgggggactcatagaatgagtttggaagtatttgctcctttacaatgtttagggatagtttgaatagaatcgatattagttcttctttaaatgtttggtagaattcagtggagaagccatcaggtactgaacgttttttgattggaaaagttttattactaattaaatcctgttactaattattggtctgttcatgttttctgtttcttcatgattcattcttggtaggttgtatgtgtccaggaatttatccatttattctagattttctaatttgttggcatacagttgttcataatagtctcttatgatactttgtatttctgtgttattagttgtgatgtatcctttacctctgattttatttattttagtcttctctctttttttcttagtctggctatggtttgttgattttgtttatctcctcagaaaaccaactctgttttgcttatcttttgtattgcttttaggtcaatttcatttgtttctgctttatctttattatttctttctttctactaatattgggtttagtttgttgttgttcttctacttccttgaggttcaacattaggttgttgtttgttatttcttctttattcatgtaggcatttattgctgtaaactttcctttgagtactgcttttgctgtatcccaaaggttttgctgtgtttgtttcaattttcatttttctctaaaaattttttaacttctcttctaatttcttcattgactcattggttgttcagtagcaccttgtttaattaccatatatttgtatagtttctgaaggtcctcctgtcattgattyatagtttcatattattgtggttrgaaacaatacttgatatgataattgatttttaaaaaatgttttagtacttgttttgtgaactaccatatgatctaaactggagaatgttccatgcgcattagaaaataatgtgtattcttctgttattgaatagaaagttttgtatatgtctgttaggtctattttgtctaatgtacagttcagttcccatattttcttgtcaattttatgtctagttgatctgtctcttgttgaaagtgggttattgaagtcccctactattattgtcttgctatttctccttttgtgttcattaacatttgctttatatatttacgtgcttcaatgttggatgcattgtctcttgtgacagtttttgacttgacgtctgctttatctgacataaatatagccaatcttgctctcttttgattaccatttgcatagaatatcttcttctatctctttattttcagcttatttgtgtctctaaggataaagtgagtcttttataggcattatgtagatgagtcttgttttttaaaatctattcagctactctatgtcttttgattggagaatttaatactccatttacattcaaagtaattattgatagttaaggacttactattgccactttgttatttgatggttgttttgtagttcttttgttcctgtctttttttctttttatctctttgatttggtggttttctccagtgctgagttttgattactttctctttattgtttgtgtatttgctatagctttttgctttgtagttaccatgaagctacataaaatatcttataattataatggactgttttacactgaaaacaactaacctcagtcacatacaaatctctagactttcatccttcccccaatttatattttagtgtcrcaatttacatctttttattttatgtacttcttaacaatgtattgtagttactattatatttgactgytttggcttttagacttcatactagagatatatatgttttatagagcaccataacagtattgggatattctggatttcaccatatatttactttcatcagtgaattttatactttcatatgtttttatatttgtagtgtycttccatttctacttgaaaaactctcaagcatttcttgtaaggaaaatctagtggtgatgaattctctcaacttctgcttgtctaggactttatttctccttcacttctgaaggacagctttacttgtatagtattttcagctgccagtttttattttctttcagcaccttgaatatatcatctcactctctcccgtcctgcagggattttgctgagaaatctgttgatagtctaatggggatttccttatttgtgatttggcacttttctcttgctgcttttaaaattctatctttgtcctttattttgacaatttattataatgtgccatgatgagaatctctttgggttgaattcttttggggactctgaaattcatatatctggattttcgtatttcttgtaggacttagaaggttttcagcacttatcatattaaataaaatgttttgtttctatctttgtctcttctccatctggcaatcccataatgctaatgtttgatcatttcctggtgtttcrtaagtcctatggcttgtctttgttcttttatattcattttttctttgcttcctctgactgggtaatttcaaaagacctagctccaaattcagagattctttcttctgcttgctctagtctgctattaaaactctctattaatttttttcatttcattcattaaattcttcagctccaaagtttctgtttggttctttttaaatgatatttatctctttgttaagtttctcatttaaattctttaaactcttctcctaattttcctaattttcctaaatttgctgaattaggaaactcttttcctaatttgtctatctgtattctcttgtatctcactgagtttccttaagatcattataaattccttttcaggaaattcataactttccttttctttggggtcagttactggagaattatygtgtttctttgttgatatcatattgtctcgctctttcgtatttcctttttgtttctgcatcaatgtctttacacctggcagaacaatcacctcttccaaactttacacagtggctttcacttgcagatgagtcttggtatgctaattgtgaagattgtggtaactctgattcygagaagatgcagtagtatagactttgtacaagtttttcagctaagatcaatgccaataatgactgagtgcctcagtggccattttacagatgatggggagacttgactgagggaccctctcggtgtcaggtctggcatgacctataagcagctgcagtagtgctgggttatagcagggagaccttagagaggctgtgaagctaggctcctaggttcaggatttttctccttggagagaaggactgctctggaggtttgggaccagggagcagggtacagctgcaattcaggaactagggctaataggatataatggcaaygaagttccctgggagatgaagcaccatccagtggtgaccttggaccctgagatgatggggcacagtggtattccatactctgtgaagctggggtacggcaacagcaaagaacccaaaatggcacagctatcacttgggccctggaggggcagtgggtgggggacagggagcagcacagtgatgactccacttacctgggaaggaggtatctcagcagttcagactctagtccagctagtcaagctctagggaaccagggaactagagctatttttcctgttgggggaagggatgtctctgctcagccagtgcttttccctgggatgtggagtactatgtcagctcaggcctggaatgcacaactgcgagctcggccaaagcattgattccttgggaggcagtgcactgctttagctcaggcttgggggtaagtatagggggtcggggaagtgaggtatgactgctcttggccaacacaccagttcctgggagacagggcactacttcaactcaggcactggggaggcatgactactctgggaagccaaagtaccattttcccagaaggcaagacactacacttcagctcaggcatgggggcaggggcagcagcaactgggaggggtagttggaccactttgccaaggcattgtttcttcaggaggcagtgcacagcgtcatctcaagctccaaggggcagggcacagcagggactcagaagggtatatggagcagctttaccatagtactctttttcttccactgcattaccagaggcagtgcacaggttcaactcaggtccctaggggcagggtgcagcagtgactaagaggagtagttggagcagtttcatcaaggcagtttctctgggatgcaacgtacagcttcccctcaggccatgcagggcagggtgcagtgttgactgggaagggcaaatggagcagctctgccaaggcactcatttcctgtggaggtagtgtgtagcttcagttcagtccctagaggacatggtacagtgggaataagaggggtaaatggaatagctgcatagcaacttggctctcaaggtaagatgtagcggcagatcagggatggcagggcaccaggcaggagtagtccagcagccgttaagcctcaaggctggtagggggtcatgccacttgccctcagagcaggacrcattccagcagtagtttatgttccaagatgacatagtgcagtagccttgtaggccacagggggaagggcacactgttggcttctactctggggtagcacagctgtgtggacttcaggcaactccctcagctggttcagtgcctgtgaggactgtaggtgtccagggtgttgatgggggctgctggggtcctcttgcttaccttttccccacaaggagacatcctcttggttctaagctgatcctggctagagagtggggtgttggatgccagatatttcctgggatgtggagtactataatagaaaccagtatgtggccatactggttttctrtgctctacagggtttctgctactcctttgatgtattctgacactctcgtttagttattttcatcaaaatatagtgttgttttggttgtctttgtgggagagatgagtactaagggcttttagctggccatcttgctgacakccagttgactttaatttcttttttttttttttgagatggagtctcgctgttgcccaggctggagtgcagtggcgcaatctcggctcactgcaggcyctggcccctcggggttcacgccattctcctgcctcagcctcctgagtagctgggactacaggtgcccgccacctcgcctggctaattttttttttttttttttttttttttttttttttttttttttttttgagacggagtctcgctctgtcgcccaggctggagtgcagtggcgggatctcggctcmctgcaagctctgcctcccgggttcmcgccattctcctgcctcagcctcccaagtagctgggactacaggcgcccgccactacgcccggctaattttttgtatttttagtagagacggggtttcaccgttttagccgggatggtctcgatctcytgaccttgtgatccgcccgcctyggcctcccaaagtgctgggattacaggcgtgagccaccgygcccggccrctaattttttgtatttttagtagagacggggtttcactctgttagccaggatggtctcgatctcctgacctcgtgatccacctgcctcggcctcccgaagtgctgggattacaggcatgagccaccgcgcctggccaatttcttttttgtctaatgtctctgggtagaactcccagcacactgttgaaagcagtgctgacaagggcatttttaccttgttctgatcttaagacaaagttctcagtcttttacccttgagtatgatgttagctgtgggtttttaaattacataaaatgtaattatggagatgacatgaaacattctaaatttataacagtgtagtttgaattaacaccttcactttaatagcatgaaaacaactgctcctttgcagcgttatctccccttttatattgttgatgttacaaattacatctttttccattgtgtactaaataacatggatatataaagtgaaattgcaaaccaaaaatacacaaatatcagcatttatatttgctgatagctgatatagttacctttactagacatcattatttctacgtaagtgtttgagtagctatcttgtattctttcatttcaatctgagccctttagcatttcttttagggtagggttactgataacaaactctttcagcttctgtttatctgggatgtcttaatttctccctcgattttgaaggacagttttgccaggtatacaattcttagtcaatagtttttttctttttctttcagcatcttaaatgttatcccttgacttctggcttccatggtttctgatgagaaattggctgctaatcttactgaagatcccttataggtgatgtgtcacttatccctcactgctttcaagattctttgtctttgttttgttttgttttttaatagctcaaatatgatgtcttgatgtgaatctcattgggtttgacctattgtaattacttgtacttcttggatatgcagatttatgcctttcatcaaatttgggaagttttctgccattatttcttattctttttgtctctttctcttctctccttccgatactcccacaacgtacatgttggtctgcttgtttgtgttatacatgccctttaggctctgttcatttttgtttatcatttttttttctgttcctcaggttggatattttcaactatcctaccttcaagttcactgattctttcttctgcctgctcaagtttgctgttgagcagcaaactgcctgctcaagtctgctgaagtttgcaagtttgctgttttcacttaacttacagtacttttcagcttcagaatttcttttgactcctttttataatttttatctttttactgacattctcattttgatcatacattgttttcctaatttcctttagttctttgcccgtggtttcccttagttatttcagcatatttaagatagttgttttaaagtctttacctaataagtctaatatctgtgcttcctcagggacaaattctgtccatttattttgctctgttgaatattataatgctctaactctgaaaattagattcttctcctattttagggtttgaattttttgtttcactctttgttgaaggctgtaatagtccatttgtttagtgactttccaaagctttttttggaaagactgtactagttttcatgtgagatcgcatwtgtccctgttccttcagcttttgttcagctaatgttttgmtagagatttgcttgacctctaggagtgaaaaaacaaacaaacaaacaaacaaaaccttctccagtccttacagattatttctgtgctggagtacttattcaacactttgccaggcttacactgagtctggagataatccagagctgaaggctttgggttttctctggtctttactgagcatgtactatgccctgggatgcacatagcttttgccctgggcatttacatagcattctacatttcccagcatacacagatgctttagactgccctaattcctccaaggaaatttccttagcttttcttccaggctttagatggttattttatgtatcaactgtaatttttttgccctaggcaactgcatttgttagcctaataatgttttcaagcaatgtgcactgcttttctgcccagagtgagttctgtgttaggtggaacagagatgagtgcctgcatcaatccttcaggtagttcccagacaggttgggacagacatatgtaacaatttgtaaataaggcctgctatgctccttttgtaaccagggaccagggtctccctctgggaatgcaggctatcttcaggattgtcactaagctgagtagggggtggatcaagtgcaagtagaaatgccacaaaactttcctgtgatcctaaagttgtctttttcttgattcagtgttcacttggttgcagtatacttttctgtttttcagattttcagatttctgacagtttctgcttgtattttgatatttctgtggagatgtgggaacttggagctgcctacttcaccattttgctggatatcacctattatttgtcattaagtgttttaaagcattgctgtttagtgactacatgttgttccattgtatagatgtaccataacttattgtaaatgatgccataatgaatattttttcacatctctgattaacttttttagcttaggataaatttccaaaagtagaataactatgtcgaaagttatgaacatttttcagtctcttcacrtttattgccaaattgccctgcagaaggtttgcatcaatttattttcccacaagcaatatatgagagagtatatttcatccctcccttctctgtaatttaatagtttttccctatttataaggccaaaagtgacatcttgtggctttgtctgctcttttaagaattctttacatgacttgaatttgagtccattaattgttttattccctcagtttgtgatgtactccagtttgtccatttcctcaaatgtatgggccaatgaacttatgccattcttctgatcaagaatacattttcctgctctcataaatataaaattcgaatttattttatagtgaatctgaatggtgcctaccctaagctggtgcctttcagacctgcaggacggctgatctctccacctctgctactctctgtgattttcaacattcttctcagcctggccatgcatattgcaggcttcatcctggttcagaggcagccttggtattccgtggagatacacaggtatgagtatagtctcagcttctgcttctcacattctaatttctatcaaacatcctctggccaatatgatgggaggcacatgggtcttcattctgccaaaggttttggctttttaaagtcccttgggcaaattttcagtgattatttcttctctgtagcatgatttaatgctaatgaatgtatcattcattcattagcacttatctttgtctgtcttatatgataatgatctatgaccatctttgatatctagggtgaccatggattataatttgcctgagcagccccagtttaagtagcccactttaaattaagtgatgtcccagtgaaattattaacatctttccttttcaccttcaaaactatctttgttagttaagttatatattcaactcacttacaaattatcagagatttgttgttgttgtttatcgggggaacctgcccccaatatttcaacataggttctaatttccctaagtgtctgctggctgagaaataaagagaaagagtacaaagagaggaattttgcagttgggcctccgtggtgacatcacatatcggtaggaccgtgatgcccatctgagctgcaaaaacagcaggtttttattaaggactccaaaaggggagggggtgtatgaacagggagtaggtcacaaagatcacatgcttctgaggccaataaagatcacaaggcaaagggcaaagcaaagatcacaaggcaaagggtgaaatcaaaagctcctgataaaggtctatgttcagctgtgcatatattgtcttgataaacatcttaagcaacagaaaacagggttcaagagcagagaaccagtctgacctcaaattcaccagggtggggttttttcccccmtcctaataagcctgagggtactgcaggagatcagggtgtatttcagtccttatctcaaccacataagacagacactcccagagcggccatttattgacctccctccaggaatgcattccttccccccaggatattaactattaatattccttgctaggaaaagaattcaacggtctcttccctacttgcatgtccatttataggctctctgcaagaagaaaaatatggctctattctgcctgaccctgtaggcagtcagcccttatggttgtcttcccttgttccctaaaattgctgttattctgttctttttcaaggtgcmctgatttcatattgttcaaacacacatgttttacaatcartttgtacaatagtggtcctgaggtgacgtacattctcagcttacgaagataacaggattaagagactaaagtaagacaggcataagaaattataagagtattatttgggaactgataaatgtccatgaaattttcacagtttatgttcagatattgcagtaaagacaggcataggaaattataaaagtattaattttgggaactgataaatgtccatattaaaatgaaatcttcacaatttatgttcctctgccagagctccagccagtccctctgttcaaagtccctgacttcctgcaacagttgtcgttgttgctgttatagagatggagtctctctctgttgcccagggtggagtgcagtggtgtgttctaggctcactgcaacctctgcctttggattcaagcaattatcctgcctcagcctccccagtagctgagattataggcacatgctgccatgtgcagctaatttttttgtatttttagtagagatggtgtttcaccatgtgggccaggctggtctcaaacttctggcctcaagtgaaccacctcggcctcctagggattacaggtgtaagccaccacacttggccaaattatcagagatattaagccacttgagggaggaatcatgatttaccaatctctttcccatatagccttaatgaatgtgcataatttgttgaatacataattggctgaatctctctctctgtctctctctctctctctcaatgtatccaaaatacgggtctatctgtgcttgttgattttttcccctatttttcagtgtgtgtgtgtgtgtgtgtgtgtgtgtgtgtgtgtgtgtgtgtgttttccaaagcacaggcaattgtagaagcattgagtgcctgctctggacactgtttggtatggaatcttctggatacaaatgctccataaagccttgcaatcttacttcattagcttctttggttttcccttttagtgcctgcacagtacaaaatgaaagcatctcagagttaaccatgtctccaactgctccagaaaaaatggaaagtaatagcaccttcacaagttttgagaacactacagtctggttcttgggaacaatcaactgtatcactgtggctcttgtgttctctaaaggaaaaccatttagacagccaacttatacaaactgtgagtagaactgtactgcatcagaggtgagaagtcatcagagaggggaacagacatgtccaggtcacttagggaacagctttagagttgattcttatctagcatctcttgacttccactctaggactctgcaaaacacatcgtacagcctcattttcayggttctttgctctttccttcaaagctacattaaatactagggcttctttctccctttccttcgccagaagtttgcctctgggtgtctttcttgggatcactccaaattgaaaagaccaatttatttctctacttgtcagtacttgtcagaattcaccctggaaacagtggagagaagcgtaacagaactcaagtggatcctgtctcttgccatgaaggcaatagtcagggtggcattgtgtggtggcaggctgctagtgggtccagcctggakgaacctgactagagagggttatggaggctctcggccagagtacctccctcctacttccttacattctggagtaggaaggtatgtttggatgagaaatgagtgacctgtttaatcttcaagacatttatttgtatatcatcactactcttcttattgaaaaaattcaaagcccaaattgagttcctttatgaatattttcataaaaatttatttgttcagagaaaattatttagcttttcttcttcctgggatgaggaagcagctaaatactgacctctatatgataacaatttaaaaattggtttattgacaggcttcctttttaccagaaaatgatttgaggtagataatttgcattaaagtgactcagatacttggatgtcttcaaggcatttattgaacatgtattttgtcaatgttaccctatgtatatctactacttttattaattgaaacttaaaatgtgcatgtgaaaattttcacttgcttcaaggacatgcatagaaattaaagaggtgagacccattgcttagaaatgaatactttccatctagtatttggatgtagaaatcaagtaaattaaatcagtgttaatctagaatacatccgtcaatatatgtgacatttttcactytgatttctcaaaataataccttgtgttcttatttcctcagatatatttgtccttgtgctgataatacagcttggtgtatgtctattcattctatttgctgatataccagaattatatagacgtttggatgtaagtctaatctttgggatatgatgatgctttacagttatgtaacagtttaactttaaaaagcagatcacaatttcaattgacatgatttttgacacaaattattcttttgggatggcagagctaaaaaaaatgctaaatttatctatattttttatttaaactggtcaagaaataaaattctacccagttttgatttcatgagattaaagacagcctttaagtattgaatactttaattttgttttcttcttattatttaagagacaggatctcactttgttgcccagtctggagtgccatggtgcaatcgtagttcactatagcctcaaatttctgagctcaagcaattctcccacttcagcctcccgagtagctaggactgcagaagtgtgccatgatgcccagctaattttttwaaaaaaaatttttgtagagatgagggcttgctatgttgcccaggctggtctcaaactcctggcctcaagctagcctcctgccttggcctcccaacgcgctaggcttacaggcttaagccactgcatctaaccaaatatttttattttaaaagatctcctatgagaaaatgtttttctatattttctctttcaaatatgagagaattttttcctaattgcttctttttttgaagttgtttaaaactgttttgcctatagctttttttttggttatcatatatttatgtatttttttacggctttaaaaatgttttctgtgtgttcatacttaatgtctgtaaaactcactttccaagagccatatttttcctcataaactctcttatattttataatattgatacagctgtaaaaacctacaagataccaaaagtttacatatccaagccagggaaaaacatattttgatccccttaacctatcctacttttattacaatttaatcacggctaaatgatctttagatcaagaaatgcaatattgaagagatgactaaagaaacagctcttttaattgagtgctttgtatatctggttgcctctccatctcaaagatgagtctcatgaggtccaacagtgtatcttattcattcttgtattaccagtgccttccacaaagaatgtcaaaaaatgacaaaggaatgactgactgatcattgcgtatcagactcctaaatataaacaagcacttagagcatacagtgcattcccaaccagcaacacctgcacaaacccacagtgacatttggcatactaactaatatctttagtttgacatactaatatgtttagcatgagtcttcttatttttgtaactacatcactgtggttagcagtgtaattaccactgttgttaagtgccttcgtgaattaaattaagtattcatggaaataagtaggctttgcccactggtcttctaagtcagttaaaacttcttaatcctacagaagttaaggatgagatgtggtgagttgaatgtcactttttaatagaagaagattcttacagaaaggctgggtcctctggtataacaaaatagggaacatatttaatttggagagaacctgggtagggtcattgccagcatgactgcaaaggattctgcaaagaattattgttcacttttaaaacaattatttttcttattattacataaaaatatgtgttctttttagaaaatgtagaatgtgcgggcaaggaaaattataacattattcactatattcttccttcttttacaattcatatactataaatgtgttgattaatttttagttttttttaaaaggatggaatcatgttgttttgcaacctagaaactgcttacttaaaaatttataaattattttaatggggaacacattcatttggttcacaattcaaatgtttaaaaagccatatagtgacaatccccatcccatcttagattccccgttaccagttcctctccctggaggtaaccaatgacactagtttattttacatactttgggacatattttgtatattcttcttccacatttttacataaacagtagaaaactattatatttgttcaggtcttctgagatgtagatgacaagttgagtttagttatgcaagagatttgctggaggaaattctcggggtaggggtaagggaatagaaagccagaggaagtggggagaggcatcacactgtgatgtgggtttatcctctaaaacgaagggagggaagaaggagggctagatgtgtagcatctcagactgcagtacacttctaagaaagtcaggccaaagttgcccatcaggagtttctacgtctcgtaggaatgagtctgatgagaatccgtgstgtcctcatttcttggctatgtgcagcttatgactttagatatgctttacagtggatgtggtggtggattctgagcataacagttggggtatccaccatttatcctcccagcagcagaagatctgagtggaaaattttcatggctgctacaacacatacattgtcstgcaccttgcttctttcatataacagcattaattgttccatatcagtacatacattttcctcattctttttaatgctaatataatattttatgtaaatgcatattatgtatatgtcatatgtataccatgctttatatgtagtcccatattgatagacatttaagatgtttccaagtttttattacaaacaaagctgcaataaaaataytgtgcatatatcattttagccatgtacaagtatatttctcagataaattcctagaagtggatttgaatttttaactttgagaacactgtcctctatggaactgtttcagtttttactcccactaacgtatgaggcaatgcataagtcagtgccagatacaatgggatgcccttggcactttttcattcattaattcacccattgattcactcattcaccatacatatatrtcaggcatgtgcctggaaggggttggggaagacacagagaaaatgggcaaagggacaggtcatgacaagcttgatttcagctccatttgctcctttggcaagggcccttgtgagggcacactgtgcagctggatgcacagtcctgagggtgaagccctgagccagtgctaaaggcagggcttggctggggagagacgggacaccagggagaagagggcaatgctgcccagttgtgaaggtttgacatgggtaccrtcaggcctcctggggataaagccacattcctgcctcccttttgaaaacaaaacaaagcaagcaaacaaagagtgattttcctcttcttttctaattgcaaagtgaccaaagttattttaggaaatttagaaatcatagagaaacacacacacatcacaagaagaaaaaaagataaaagaagaaaagcaacactcataacccccccaaatcattaggatcataagtataacctttcygtactttttctgtgcatacaagcatagaaattttttatatatataagatatatgtaatatacacacatatatattacatatgagatttataacctaggaaaatatatgctgtgaacatgtgagcatgtttccagcatctgcgtgtcttcagactaactgtgcttcatcatctcccgccagctgctctgcactcccgtcctgtggagggcctccattgtcatcatgctcagcttgaatttcattgtgtcccttgtggccgaggtaagtgtgctgatcttgggctgctgatcttgtgtgtgtgcacgcatgtgtgtagggggacttctttgggactctgaaaacarcaactttagctgacatggactcagcagtgcaggggctcccttccttcacagtataagcaatggtgccttcctctgatgagtcccaagcaggacgttagttttctcatctgtcaagtagggcgggggagaatggaattatggtctctaaggtcctgttcatttctacaatttccaaataaagacccaacacaatttactttttaaaattgagatatgattcacgcaccataacattcacccttttaaagtccacaattcagtagtgtttagtgcactcactgagttgtacagccattaacgctacttaattgcaggacattttcatcatcgctaaagaaatcctgtacctactagccgttgctcttcattgccccttctgccttctcctgggccttggtaatcactattctactttctgactgtgtggatttgacttttctggacatttcatataagtgaaaccatacaatatgtggccttttgtgtgtggcttctttcacttaactcatatcatttttgccttgcggatgggaaataacattcatagtgagcttttccggctttcattctccagcttccatttgctccattttctagcttttattcttcagctcccctgtgctccatttcctcagtgaaatgagcttgtgctcctgctttctttctccacgtgattcacgctctccctgctcagtactaccagacacaatatccattcttcaaagcctgttggtaggcaggggtgccctgaaaaggcatttatgaacaaaggagaggtgagatgcagaattccatctgtctctatttctgctctgggatacagaactagaattattcctgcaaatggagtgttcatggtgagctgtgagaacctacagcctgacttccctgcagtattgtgtaggcaggacctcaatgagctctccctgcttactcctatgcagagtgaaggctgcacaggagctggtggcagaacaggacacagaatttcagtactggaacttctctctatatgctaaacaagagcttctcaaacttgagtgggcatcagaatcacctgggaggcttattaaaacacacgttgcccagccctacccgcagtgtgtctgattcagtaggcctggaagaagtgcaaaagttagcatttctaacaggttgtcaggggattctgatgagactagttcagggatcacactttgagaagcaatatgctaaaccatatggtctctaaagcaaccagattaataaaagagcattatsacgggtgtcctcagacccagtggcagaatgatggtctttgccctttagagggggatctagtgtatacatcttatccctgttcgtgatcacaggattctctctgtgtggtgtatgtttcctccatttccgcatattaaagtgctattccatcctctacagcacagctgtagtagtatcctcttcatgtatctttcctgatctctggatcaggtaggcaagtaacgacttaactaacagtggcttaaataataaagatgtttattgactcaagaagaagactgaaggtaggtggcttcaggactggcttagtaactcagtagtgtcactgggaatccacactctttcacctttctcttctactctccttcgatgtggtctttcatgtttgtgcacgtgattatggtgtccagatagcttccacagagccggactttacatctgttttcagtgcaggaagaaaatggaaggagaggccacagcaagcctatttccagcaagtctgaaccttttcttgagaaacaaacttttcctgaagctcaccagcagacttccttttatgctttatcgattacacttgtgtctcatggtcatcatgagtagaaaaagattctgggaaagtggatccatgtcaaaagttagacaatttggcttagaccacttattatcattatttttcccttttaggtgggaagggaagagttgggagggaatgggctgtatggtaatgaagtatcaaagtcttccttaatcctctagcaggaagttcttcctttttcagcatatttgcagttaagagcacaagctcggggtaatctacgtgggtgggttcgaatcctggctccaccactttcttgctctctgactttgggcaaattattccacttatctaatctctgatcagccctgaaaacaaacaggtttgagcaggaccttatccttactatgccagtgctcatgatcgaacctccagctgagaggcatgagaggtagtgtggatagctttaattgcccccacctttaaaacaattattgatgtgtttatataggtatgcttgtatgtatgagttatttgagtagccagtcagaagcgctcatgtggcgaaatttttttaaagaaatgtctcactaaggctttcgtttttttctagttgtattttagtccattctcccactgctgtgaacaaatacctgaaacggggtaatttatgaaggaaagaggtttaattggctcatggttttgcaggctgtaccagaagcatggctggagaggccccaagaaactttcaatcatggcggaaagcaaaggggaagcaggcaggtcttacatggcccgagcaggaggaagagagagaaggggaaggtgctacacacttttaaacaatcagatctcatgagaactcactcactatcacgaaaacagcaagaaggaaatccatccctacgacccagtcacctcccatccagcccttcctgcaacattggggattatatttcagcacgagatttggatggaaatacaaattcagatcatgtcactagttctgccttgtatttataatgtgcggtaacaggacagatcacctctctgtagtttcctcttccagagcagcaaggtgatacaggtcatcagagtccagaactaaaaaacactgaaggcaagatgtagagatggagagcaccaaagtttctctctctgtgtgtgtgtgtgtgtggtttcatctattttgttttaaggtttgctaaggtttccttgaagtaagtaagattttaaaacctttactcgatgctcctgccttatcccagctctaagaagaactactgttttcacgtcaattaaggaggacaaaaaaaccttgctgcaggaaagtagaataactcatctggctaagtttccaagaggctgagacggttatatggatctttaacagccccgcagccagcagatggtcagttatcacaggaataatgcagactggctgttctctatcctttcatgggcagtggaacctaaatggcaaaaatgggtagattttaggaaaactactatatctggcaaagttccttatagaatctcacagaattaactctttcaaattagcaaagatagacatgaaaatcagttctaattctgtgggacagtttcacgtcccatattttttctttgtttctttcacaataacctctaagatggtcaatctttgtgagcaaacatgataaaagtggaaaattaatatgataacctctcatgaattataagttataacttgggctctattcaaggctcactctaactcatgaaataaaatggcattgcaaaatgttttcaaagagacatgtcttttgtaatcttaatactgtatttcagtgaaggtgaaggttagaggcatgtgtgaacaggaccacagtgcatagccatttgttaaatgagtagttccaaagggtaggcaaagggagagagctatgccctgccctgccctgcattgtaaagggagttatataagccttacaacaaacataaggaagggattattctaatcacggagacatggatagagtaactaatttgcccataataggtgtcagaactgggacctaaatccagatctgttcaactccaagactggcccgtgtgaaattaaatatgcagtgatatgtcaggatatatcaaaaacatgtcatacwtgggccacatctttatatagggtcaattgtgtttagtatttagtagtaattttaatgtcattttatattaaayaaaatatagatgtgctatagagtgaaacatagaatttgaatgattttaaattcaatttagatgtgagattcaaaagaaacttcatttttgaggcaagccatttcaagttatgttcccagagtcttgaaatgttgtacctcttacttctcccacaggagttacttaagtagaaacgtttgagaaaccaatacctgtccaatgaaaccaccttagattggtccagtggtcaagctctttgtcaagctggatctaagcaaccattgcagtagtgacttatgatggcctgtggagggctgtagcctcaaaacactcaacccttgcttgtaaaaagtaattattttattttgcaggaggctgttattgaaaatcgagccctrtggatgatgattaaaagatgtttcggctatcagtcaaaaagccagtatcggatatggcagagggacttggcaaatgaccctagttggcccccgctaaaccaaacctcccactctgacatgccggagtgtggcagaggagtgtcttacagcaatccagtatttgagagyaatgaagaacaactctgaaggacatgtgatatccaagttgatattacagagaaacaatgacaaaagggaccagtttcattgattttaagaaatgagactcttgtaacatcagctggagttttggggctacctatcaaatcatggtgacaaactaaagtctgtttgataaaatactgtctacagagaagaacattgacccagaagagtgctttcctcttggcttctgaaggtattagaggcattcagtgaaggcaagaatgggccaagaatttctatgggccaagagacaagcaggctaaaggggaaaaatatgtgatctttcctcttaggacaggacaatactttcctttttataaaaatgagttgaggggaagtagtactgtgtatactcacggagttgtaatttttgaatttttacttcatcgatggaaaaactaatgcgtgggaaacattacaccaatctttactgtctgggttccttttctctgtagtacttttcagatttgaggctttttcttctgtttctggccttacccaacatattgttaaggataagcttagcctatgctgcaataaaaaacaactctcagatatcagtgccttaacacacaagtgcttctttcgtgatccaggtgacactctggaactgccattcttacagcagtgactgcttcaacctgatggctccatcagctcgatgcaaggactgtgtgttgactgtgatgggggaaggaatagactggagatcacgtgtgggctcttcactgcctcaccccaaaagtggcacacattgctttccctactcatatctcattagtcaaggatttggccagggagctggaaagtgcagtctcctgtgtttagggatgcttcatgggcttatgagctgtcactacacagggccccatgcttagaaggtccccacacttggctttaacactctgctgtttccatcttaaaattcttaatttttgaacaggggtccccatattttcattttgtaccaggccccacaaatgatagagttggtctggaacgtagtcctgggaaggagaggaaaataacagatcagaaagcacgagtgctgtccactacagcccacttttcctaaccccagtaacttatcctatgttttaggaatctctcatgtcacatggccaactccagaaattttcactcctctgctttattatttttgagaaacattagtctcatgctacagcattatatggcactattgatgggagttcttacacaactagtacattttttttttaaagtttgtggcttgagtttccagaaaactaaaattgtccttattttgtcactattacaatttggttatatttgatttgttcagcacaaggaagactcaggtttctgttacctcaggagacaacactgaactctaggagcacacctacatataatattttaaggcaaaagcaaaatttgtattatgagcatcaaatcctaggtgaatgttctgatcaggggataagtgtcctggcccaggctggctttggaacttatcaatagcatttgcaagcattccttccccctaactgagctcttgagcatggctgatggctctatgattgcagctgattctaggaacatggtgtctcccagccatgagggtaccctgttacttctggttttaaaatagggcgtgaagatattttagtgtttcaagactgcagaatcactgtcttttttggtacagaaagaaatgtttccttttgcaaagccagcctcagcaatgatatggcagttctgaatgtccttctctaaaagtgtttctcattttccaaaagtagagggttgtaggcaggggcaagctagagatggtctgtgacctagtcatgagcaagatcagcctgcacagttcatacttaaatgtgccctttgctaagtgcattcacctccactaactcacctgaatggtacaattgtcccatgactgaacaaggaagggcttatcatctccaccatacagatgagaaagctgagattcagtaatggcaagagcagatctaggcctcaaatacagatcttctgagcaaaccttatattgctgccaaatacttccaaattccagagttccagcagggcaggttgcttagtgtgatctcacagtcaagcaaagaatgggcaaccctttgctaataccaggccctctgttcaaatgaatgccaggcatcctgccaggcctgggctagaggtgtattaaaaacaaaacaaaacaaaacaaaaaaatgattgtctgtctttctgagactttgagttgctcttgccttgatcctaagtgattctatcactagcaaaggctggcagggaacaggaagaaaagaatctagtcctccactagtcaagcagccataaaatctttgggaaaagagactcattttgaagactgtattcctgggattaactacatcttagaagcagtaattgaaggaacagggagtgcccagcctggaaagaaaacagtcaggggactgtgaagggttttcctgagaaagaaggatcctacttgtgccaggtggcatgagaaggcaaaatcaggacaaatgggtaaagatcacagtggggatggcttcaggccatctgccctaaccactgtcctaacagccagcactgatagcagtggaatgtactctaggacattggaggaacaagtggctattcaagggccaagtagagaaggaagtcaagtatcagatgaaactcaattacctgcaagatctctttcaagcttgatacacccagtgtctcagtcttatgctgtgatgtgaaccttttttttttttttttttttttgagatggagtctcactctgttgcccaggctagagtgcagtggcacaatctcggctcactgccagctccgcctcccggattcacaccattctcctgcctcagcctcccaagtagctgggactacaggtctgccaccatgcccggctaattttttgtatttttagtagagatggggtttcatcatgttagccagggtggtttcaatctcctgacctcgtgatccgcccgcctcggcctcccaaagtgccgggattacagacatgagccaccagatgtgaactattttctactactacccacacagaataccagacagacactcatgggaggatgggctctggagggagggctcccagccttgtcagatccgattgtgtggacatatagactcaattgccctgtaccttgaaaggggacccctaatggagataagatcctaggaaagaggggcagagtaggggtcctgattgtcagattgaagctggggtaatacttctgatttgtgaattttcttaaagagaggtgttaaaaaactttgcatgaaagagcgtgggagagtgccctaaacttgagggcggagcaacctgttatcaatacactttcttgagcagagtctgaaggagaaacgaacacagtcacatagtccaaatcatttgagacggtgccctgtatgttcatctcaaggcatctagctcttacccacagagaaccgtgactctgggcttccctcactaaatatgtctgtgacatctgtatccttatgtgcttatggaaatgttcacatacacacctgcagatgtgatgactgaaaaaaacgattatttattcagagctttgtatttagtttatgctataataaattcagttgttataaaaatcagtctctctctctgcggtggagtctttcattctgtctaatggtgtggtttactccagtaatgttgaatcaaacaacatctttacaaagttccaggcattttctaacaccacagatgctattattctctgctttatacacagggcattagagtttacaaaatactttcatccttgttctctcatttaagcctcgttaacaaccttaggaggaaagaaaggcaaggattactgtctctcttcttttgatgaggtacaaggctctccagatgtctcagcaaccaggacacatggcccatggatggaggagctggattcagatgcaggtcctttatcagcgagatccctgctgtgtcactctcctacgttgtttttcctgaatgaaaaaagaagagaaaaaccgtagcattgaaaaacaagacgacagcgaggcaaatgtccaatgtaattgccataatgagcacagtttcttccagaaagagattttggtgtttcatggaagttctcttgaacctgaccatcaatcacagaaaaggccaactcccacagctgagggaggaaaatcataacaccagagccctgtgagcccatttcatgtgattggataaagctctggtttctgacttcagtctccagaaacagaaaactatatccctgcttgatctttattcagacttgcttggcacagcttttcaggttcctatagattttcttttggctttgaactgtgctcacttctctatgcataaacatttggaaaactgctgccctataacattctgtctgccctttggtttccattagacttgttaacaatggcctttaaactttattagtaaagtgagtttctccaaaattaaacaaagataaaattaacaacaaaacacaactctcccggagttgatgaaagagccttaggagtgagccacatggctttgtcaaacactctgagcttgctctatcctcaggaagactgcatttgccatcctctctgccttgaatgctgcccgccaccaaccccctgttgccattcctgattccttctccttcagatttcagctcacttgtcacttcttccaagaagccttccctgaccactctgtctaatgttgctcttgctctactaccgtggtttgttttctgcataatgcctgtgccacccttcagatgaccaaggctgaacgagtactacttgttcaagaacccataatggggaaatgaatgagctgagtctataatctagacctactgacttccaaatcaaggttctttacatttttcacatctagccagattctgctaattaaattagctaatctgtcagggaaaagaatgcaggatgctgcagagcattgtccatggttggatgaaaagcactcaaagagtcatccagactctcccagctcttttccttgctgtcttgacttcgaagtgtttcaatgccaagaaaaatctgataagtcactgacctgtgataaaggctgcacacatacttaccgtggacattctgctgagtttaaaattgtggttaaagggggttacactgcagagaggtctcacatgtgttgtacgtatttcacactgtacagtcctaggaggcaccattcatattgtgctgcaagcccagggtgatggttttgcatcatatcgaggaagttttgtgggtaaatgatggcttttacctttgtaattacaaacacatatatgcaatgaaaagtcccacctgggcctgctacaagcaattcctaagtcctagaccctctcttggcagtgtctcttgtgcagaacttcctctcctctaagcccttggttgtcaccacctgcctgattacaagagcctcttaagtagtctccctgactgagatctttcttctattttttcttctcgaagtctctatctattctattgcacaactctgatgatgtcatgtccatggccagaaacccttaatggtctgaagtgtctaccagataaagtacacattgcttactaaggatttcaagtccttctccactggccacatctggtttcatctcagatcttttcccttattgccttctctacttcagcaaactgaatttcctattactctcagcactcagtcctcactttcccacctcaatagctgatatggtttggctctgtgtccccacccaaatctcaccttgaagtgtaatcctcatgtgtcaagggtgggaccacgtagaggtaattggatcatgggggcagtttccctcatgctgttcttgtgacagtgagtgagtctcatgagatctgatggttttataagtgtctggcatttctcctgctggcactcactccatcgtgctgccctgtgaagaaggtgcctgcagctgggtgcggtggctcatgtctgtaatcccagcactttaggaggccaaggcgggtggatcatctgaagtcaggagttcaaaaccagcctggccaatatggcaaaaccccgtctccactaaaaatacaaatattagctgggcatgaaggcgcctgtagtcccagatgcttaggaggctgggacaggagaattgcttcaagccaggaggcagaggttgcagtgagctgagatctgccactgcactccagcctgggcaacagagtgagactctgtctcaaaaaaaaaaaaaaagtgcatcctttaccttctgccatgattgtaagtttcctgaggcctccccagcaatgtggaactgtaagtcagttaaatccctttcttttataagttacccagtctcaggtatttcttcatagcagtgtgagaacaaactactacagtaaattggtaccgaaatggtagggcgctactataaggatacctgaaaatgtggaagcaattttggaactgagtaacaggcagagggtggaacagtttggagggctca

SEQ ID NO: 94038 - DNA, 290544 bp, Homo sapiens
  misc_feature (1)...(290544): n = A,T,C or G
tggatgggaaggacacctagcaccaattatcagggattagtagacactctatttgtttgatttaaattgcatcctgtttgttagctacaggcatgagagataatcatgaaggcaattcaaatactcgagcacaaatcatagtcatgaatagagaaacttgggtctataacttgctgcaattagtcttcttttccccgacatctcaagattagttaatgttgatagaatttgaaaatgataaccctagaaaataacggagcaaatacatttacaaattcaaagcacatcaagcaatggggctgcatatgctcacaaaacagaagtaatatttaaatgtattataaattattcaaatcataattttagagtatttattatgtacatgataaactgcataagggtaaaccatgaagacacatttttgggtcaaggcagatgagaaaaacaaaggtacataaataaggaagaaggcaggatagaggtacaagtaacattctaaagaggataaaggaagaaatcacttaaatccattagggctaaataaagatggcttttagagagaaggttgtctttaaatggagccttggaggtatggaaatatttgactaagtacaaaacaggaaactaattgtatttgtcaggttggtgcaaaagtaaatgcagtttttgccattaaaaataattgcaaatggcaaaaactgcaattacttttgcaccaatctaatatttaagtgtaaatagccatgtgacgctagtgagtaccataatggatggtgaagaaaatggtggccactcaacatttttgcacaagagagggacattcttggagaaatgttttggtattagttttcctctgcacaatctaaaatgttgatttatttggggaagggacctctttaacttaatcactactcatatatctccaatagatctttaattttatgatttcatctgattagaaaaacagtgtaaatgttaattgtattgcagaaggacaattaatagaagaaacgtggttaaacagactagctaaaaacaggaacagatggtaaattctggtaagttttaaaattttccagcacaccaacatgaatgccttgtgactactgagaaaaaacacattttattccttggatggaaagattttatcttactcatcctcggctgattagtgtatgcaacactaatacattgttcatgagacatatagtaaagacaaaaataagcaatgtaaacaactcagaagggcatactggtcctgatacatatgtatgacttagaaattttaggcctctaggctcaacagaattgctgcttgtcaataatgataaaaataataatataataaaaacttaaatgtgttatttgcattctgtgaaaacaaatttttaaaaatctgttttaaaaaataatctgttaaaaatgatctgttcgtttttctctaagacctccaaaagcttttagttctaagcatatgttagaatatttctttaaatcaaaacaataatgtttctctctgtattttacctgcagctttgaaacttagagggtctttggagttcaagttgctcccttatttatatctatcatagccaagttaggattactggttgatggatgaagactagatttgatggaattacagatttcgcatgggcaggtaaaatattcgtgcagaatggacattgaagttctaaaacatttaagttgaaagcatatcctgaagcaagtgtaaattcccctcttccacttgcacagaggttgtacaatgtgtgagtcaacctaacatgtaggttacctttagagctcaaatggctgctataagccaagggttgcagatgaaaatgaagaaatacggtcagtaagcagtagggagaacctaccatctgccagactcccttcagagccagttgtcctgttgcttctctgggttgcatagagttctttaccatctaactattaaataattttgtaagttagtaagcctcttgaggccaattaattgtctccacactatcctcaggccaaaaaccatgaagtcatacttgaggatttctttttctctcatatactacatccaagctgtcaagaaaccctatttgttctatcttcaaaatatatctaggatttaaccagttctcattgtctctgctgccaatatttgagtccatgccttcgtcacctcacacctgagtcacaatagccttccaagtgttctccccactcctaccttttctctcttacatatacctaaaccagcagacagagaagccttttaaaatgtaagtcagatcatattagtcttggcttgaaacgtttctctaacttcccattagagaagaactgacaatggtttacaaggtcccaagtgctttggccccattcctctctgttcttctccttcctcaccctgttcctgctacactagcctccttgctgttgccagaaagtgccaggaatctgcccttgctaggacatttgaagtggttgctctctcactttctcaaacctttgctggaatttcaccttctcaatgaggccttccctgaccactctgtataaaactgaagccagccttctagttctccttaccctcctctacttttccttttcccatggtatttatcaccatctaacaacaatttcatatacttgtttattatatctgttgcaaattatctcctgctcctagataaatgctccatgcatgtgttttattcacctacgcgcctgacagcacagcagtgccagcgatgcctggcacacaggagatgcacaagaaatatctgttgactgaatgaattatcataaaacactattttcattgtgactcgtaaatcatgtatttatacaccattatatttctagacattacgaagacattgcttgagctagattttctcagcacctaaacatactcctacatggtaaatcaggaatctctatatatggcatttactctttcaagccatcatggtgtaatttttaaagacttcaacatatttgttttttaaaatagaaagtttactttttcctgctagggtacctttctaaatttctttggctgagtcctaagcattctatagatacagctatagatattttattcctccattcatctgtacctatcatgactcagggaaacattcccaccaagagtctgaaggatgcctagccctttggaagtcctagtcatcatcccaatggttattcctttttcttttctttttttttttttttttttttttggagcggagtcttgctctgtcgcacaggctggagtgcagtggcgccatctcggctcactgcaagctccgcctcccgggttcacgccattctcctgcctcagcctcccgagtagctgggactacaggtgctcgctaccactcccggctaattttttgtatttttagtagagacgggttttcaccgtgttagccagaatggtcttgatctcctgacctcgtgatcctccctcctcggcctcccaaagtgctgagattacaggcgtgagccaccgtgcccggcccctaatggttattcttactcccatttcctcagctgcttccacagaacagacctggagcctctgcccccttgtttcaaatcaacaactctgattttcgtcatcagttatcactaactgatatgttcttgtttatgtccttctttgtattttttaatcactatgtgatgttgtctatgcatttttatttgcttattgttcatctgcacttcttacacacactcttcatagaatttaagttccttgacagcaaggatcatgtctgttattcactgctatatctcagaacctagcaccctctctcaagacgtgatgacaagagagtctatccgaagacatccgacatgcagtaaccattttgattcattatagcttgcaggaaagcattcccaaataaacaaagggccaagggccatgagccttctatatacccacacatagaatttcatcacagggaatgagaggccagctttcccacagcaaggatgtatttagtgttccttgtcctttctctttcctctcttttgaaccattagcttggcttttaagcattatatctctctcatgtagcccctccctacaaagccacaacttcctttgcaaaagtaattatgaacatcttcctctttcacgcatctctctccaccctggcacacaccaaaatacactaattgtctctgcataaggctacttgaaaacttgccgtatcaccatttactacatttttcaggctatctacaatttttagtgcagtgcagtctttcttatccattctctttttacaagcaagttgccaacacttgtccggtaacactaaagtacacttagaattatgcatttcttcaagggaagacaggtgagccatgctctgccagattcttgtctgcaaaggatgaccttgaaaagtcctggagaaactggccttttcattcctgcgtgttcacctccactgtgcctgctcacaaaggaagccttaatgccacggaccattgtacttttcaagcatcattgcatagggaagagacactgccttcactactgccatagccaatcttaaataagctaaagaaatactagaagttgggactgtaagtgaaatggcatattctaagggcaaaaaccaatttccatggaactgaaatacctgcctcgtttaaggcaaccatatgacacacgggttcacaagtgctaaaagttcatttactccctcaggtaaaacaaagctgcagctgtagttaaggcttgagctgcagttgtttccggaacaagaaatagaaccaagaaaagatctgcaaagaagcacttgaaatggacattcagactctatagttttttaaagcagtggcagcgttgcttctttctccagccagaccccagataccagtgcctaccaaagtgtcctctctcacacaccctcctacagtgttaggctttgtgggaagttagagatcatattctccgggggcaaggactatctcccaaataggcaatgtgaagacatcttagcagggaattgagtcatcttgggagctaggaggaagatgggttacaccttaacaatggtctgcagcaggaagatccattaaccattatgccttagcgcacccactcatactcactcatattcccccaggggtgctctgatacgacactgtccacggactgcacactcttcaggtctaattaatgatgcccaccctccccacctactaaacacatttgcaatttaagcatctctagctctccactaccacccacctttctcctccactgtcccttcttctccatggagataattaactagttgactacttattagtccttcagttgattaggatttcaggctcacactaaggccttatcctaaagtctataaagatttgtgacaccgacagggtaaaaattcgaaaccagctagcaaaactttcctgaaggatagagatactcaagatctaaaaattatctgaagggttggattccacaccatgaatccccttttcccccttccccacagctccctatagtgaaagatccgtaaccttaggaataaatgataaatcctgtgactattaggtttttcctgggagttcctcggagacccggaggtaaccgtgtatgtgcgtgcgagtgtgtctgtgtgcgtacaaggtccggagaagcgaaacggtcgcaggttcctacagaccccgaccctgttcccttggccacctggtccccggtagctgcatccctgggcggcgcacgcagtgaagcgtcgcgctctggcgccggtgccgcaccgaggggtatgactacgaccccttgcgcgtgcccgcccccacctccgcacctcgcgccagcccgcgcagcgtgaccggcagccgccgcagacccggctcggggaggcgcggagcgcggcgcgctgaaccggagaggcgggccggctgctgccttgcgttcgccacgctgtcctccctcctccgctccctgcgccccacccctggcggccgcgctgcctggcagcccgggaagccgckgcacagctgctcggcgcctgcagctccggctcgggggctggaaccgaagcgggggcggcgggagcgcggagaccacagcccccggggagaggcggagggggtccctggcctgggcggagaggctgagctgagtgcgcgtgagaaagagggctgcaccgctgctcggcgcggactctgccagccccagcttcagccccggctcaggtcgccgcagcccgggagcctccccgcttgcgccccaaggcacgcgcggcacagccatgaacaccaacgatgccaaggagtatctggcccggagggaaatccctcagctttttgaggtagggctagagctggccgacgggcggtagcatccggggactgcatctcaggggttcgggttgaggcagccgcgccccgtcccaccttccccacacggggcatgtaatgaaggggcttgtagaagcgcactcgcccgctcccccgagggtagtcgcctttcccgcgggttgccagggtccttgtcagaaggctgggcttagaagcctgcatctcacagatcaagtttcagtcttccagcagggttctgaaagcagcctgctcccatcgcgcccctcggatgtggacacccagggtgggctgcagaccgcggccgggccgcactctctgggggcgagggccaggtcaggtggctgcactgtcgcccagcagcgagtaaagactcgaaactgagggagccagagccctagtcactctgctggtcgagggtcggaacccctgggggaaagaggaaatgtggacgaaggcagcccttcctggagacagcttggaagagagggatgaagatgcaaaaagcaaaacccaacctatcaagtgccacctccccggtgacaggcccccagccttgctctgcgctttcgctgaatgaactcctgagcacgtttttyccgttgcctaggaagggttgggccgcaggtttcgccagtgctcgacaacccacctggagatagcgggtcggggagggagctgcgaggggggcggactcctgttgctcagtcttcagaccgcrgcacagcatcatctgcaccgggacccgggaatggggggacacttggagactgagagagaggaggctcgaggaatgaaccttggtctgttctaagccacaacccctgtctcaggtcgtttggcttcctttccttctctttgtatttgaatttaaaaacattcctgaatctcaagtgcttttgcttgaagtaggggggaggaggagaaaagaatagaagcaagccaggcttcctaagcgagctctgaaaggagaaatccattcactgcaaacctcgttccccatttctgaaaacggatagactgatatcgtaaactaaaggtcatgagggtttttccccccggtttgggggatttgttctgttaaaaggaattttaaagcaccacttgagaaaataattttgcctcagtttccctaaactatctttaaaatgggttgccataattacaggtcttcttttctctcacctctataagccaccgttttcaggtcatctgaagtcaagatttccaggtaaaccactcactgaactcaagcgtggtatgtgaagcccaaatctagcaaatgtgttactcctgcstgaaaataattaggtggtgttgcataaggacaggtcttgagaatatgtgggaatcttaagagttgttttttttgtttgtttttattttcaaaaagtaaatatggaaattaagaggcgaaggtttttctcacaaagattactactgagatatatttcatttctaygcttctaaaagaatcattaaaaacatctgtaggaggaccacgtgattgcaaaaattcctacatagtacatctttttttctttgtaaatgtgggtactgtttttcctccttggtggaaggtaaccacagagaagtttgatagtttattaaaatctacactgtgcatgcaaataagttatggcaggcctttttgttaaggttttatgtttcttatttacttttctgcatatgaatgggataaataatgcacacccagaaaaggaagtcaacttgcttgggtgaaatacagtaatggacttagattcacttgtggacaatgagaagatggaagtagactgctggtgacctcaaaggctacatccttcagtaagacgaatctgtgctatgcgcagctcaagagggaaggaaaatctggcagttctccatgtgattagtgtagactgtaaaactaaaaactttaggtttttaaaatggattttgcccaccacaatattttaggtgtacaaagtttaacaattagctgtctactaaacaccaagacattggccccagctgtggattttagacgctattacagacaaactgactgattattgtattgacgtattgtcagacaagtaaatatatctaactgaccttttcagattttttcctaatttgagacatcatgtaagctaaatggaatatgggatatctctggtacgttcatgtttgaaatgtgtttccagttttagacttttttaaacccactttcttattattttgtcatgagttcttaattctggctaaccttatggtgtgtatattgatcttgtagcttacagcagagatttggcaatcaatttgaatactgtggaaagtcagattattcaaggtctcaaagggttcactcagagactgagcaataatatgtgctggttgtcttcaatccctgatagtggctggctattagaagaaaagatttgaattatccgtgaaggaatggagctcattgtcccattttaaaatcaatgccctttggtgaaccagtattgtttaaggacgctggaaatgtatattttcagaaaagagtcattgagagtgttcacccatttcaggcaatagtagggataaaaagagggcattttgcagagggcacagagaatctcatgttttcttttrtctcatatcacrtttctgcaacaggtacagagaagaacatatgggttttggaattggaaacattgaattgaaatcctgggcctaggagtttctagttgagtaaactagagccatcactaatatctctgagccatgatttcctaatctataaaatggggataataaagtcacacagggctgagaatgcactgggtatgcaaataaatatatgacacagaggcttttatttattaatgaggctaatactggcttggygtatgggaagaatgtgagaagctcaactgcaatgtgtgtgtatatgggacagattttgacaaacaaactgaattggatgcccgggtaattttttctgctccctctgcaattgaacttggctgatggaggtgcacactctagcttactctatttaggatttcagaaaacaaatgtacctagtgagaattgcctaccattctgaggaaattacacaggaaataattgaaaataaaatactgtatttaaacagmtgtcagcccttcaaagggtgttttgtatactaacaatgtatattggtaagaataatcctttatgcattttccatgaaatactctaaaggaaaatattttgcacatcagtccagcttccaggaatcagcatttccaaactggtagcatttttagaatctagtgccagtgacacatcagacaccatgaaccaaaaaagtaatagcaggatcatgctttgtttcttttcccctctggaatctcagtggatatcgtagtgacttactctatgtcaaatagtaatttttttttttagtctcagacctaaatttttttgagtctcagttagacttgagctttgagggattttttttttccaattggaaaacagttaaatatgcacctaccaaatgccagggaaagcatcagtatctggggattgaaaaatgaattagactcactctgtgttgttgaagagcttatagtttagaagaaagactattgcataaccgaatggtttcagtataaatgacaagtatgatgttttatgctggataccatgggaacacagaagaaggggttcacagacaaacctagggattcagagaagacttcctgatagtaataataactaaaaccaacaaagtttattgggcacttactatgtgccaagcatttaatatgcactgtacaaatatgaaattatttaattcttaaaaaactctatgaggtawttattattacccccattttctaaaagaagaaactgaggtttagagayataaagggtgggtaggagtgagataaataatgaccaggggcattttcacatgctgcattttatctcactgtgatgaagtgaatggctcttccattttaaactatctagttgcctgaattgcttaagaggcagagaatgctgaactgaaaactaattaggcaagaatttaagggattatcttaatgactccatcagatcgtaatttcaactctaattgtttattaaaagacaaatgcaaaggacaaaaacaatcagaattcaaagatgagccataatactattttaacaaaggtgggtggggtcacgtgcagtggctcatgcctgtaatcccaacactttggaaggcggaggtaggtggatcgcttgagttaaggagttcgaaaccaacctggccaacatggtgaaaccctgtctctactaaaaatacaaaaagtagctgggcataatggtgtgcacctgtaatcccagctactcgggaggctgaggcaggagaatcacttgaaccaaggaggtagaagttgcagtgagccaagattgtgccactgcactccagcctgggcagcagagtgagactctatttcaaaaaaattaattaattwaattaaattaaattaaagaaaaaacaaaggtgggtttaaaagatattttatttgtacatattttgttatattycagagccttttgaatggactgatgtgttctaagcccgaagatccagtagaatacttggaaagttgtttacaaaaagtaaaggaactgggtggctgtgacaaggtgaaatgggatacatttgtaagccaggaaaagaagaccttacctccactaaatggaggacagtcacggagatcctttctaagaaatggtaatgtatatggagaataatagacagttttatagttatagcaattctctttaaaacatgccatatagactatacacagtgatttcattttttgagtttataaatgcctgaagtcattggatcaygattaatttttctctgctactaattctaatcacttccayaaaaagacaaacaaaattayctaccattgtccaacaattcactagaggcttaatgaaattttttattactgactttattattttgcaaaataaattacattagcaarccatacatacattttccttaaaattgcaaacaagatttctccaaataaatgaatagaatacgggtataattgatagttattacatagcagttcagcattttttattagctagaaagagatttggcttactaatatttccaagttcagagttcatattaatgcatctgcataaatgcatgtaaagtttatactagtgataaaagaaaaacttcagccaagttaaatctaaaggagtttaagtgagcaatgaacaattcaygaattgggcaacccccagaaacacagcagattcacagagaagccagcgcagccacgtggtggaagaagatttatagacaaaaaaagggaaatgatgtatagatatcggaagtgaggtacagaatggctggattggttacggttcagcatttgccttattgaacacagtttgaacactcagcagtgtatgaatggttgaagtacagctgctgggatcagccaagactcagctattgttacaggcgcatactcctaagttaggttttcaatcttgtctacctattaagctaggttgcagtttgtccacaaggactcaaatatagaggtacagagtccttctcaggccatatttagttcactttaacactagttaattcaataaaagtgtattaagcatctactgaatgcaatgtattaatctaacacattaatctaatctargcatttgggtgctataaaggaagttggagaagtaaacttgtttaaattttaggagttgtttagaactaaaaaccgcagttcattagagaagatttgtggtgttttgatctctttctgaaatatgtgcttatcagaattaggggttcaacatgagccaaccagcctttcaggctctagatgaatttgagacgtataatagtatgtgcaaattagaatcagttcaaatcagggggaactaaattctgttctagtggccaaaatcattatattttcaaaactgaaaccattctcaaaaattgtacaacaaaaggtttatgctatacagacagaacctgaaatggagacaattctatctgcaatgaatatcagcaggaagcaatcttagttgcttaaccttattagtcatgacctacatagattttatttgaatgcagtgtgggaaaaagccatagtgtgctaattttcaaggaacacaagcaaaagaaggcaaacagaaatagcttttcctcagaaacatctctaaagaaaagagtccttcaccattsatgcagaagtcaatgatatgactctgaccaaayttcccactgctgctgagaagtaatgagatgtctgaaactgctatttaaaactaattttagaaactttcaaatgttataacggaccaaaaaacagagaaatagaaaatttttgatgtgactataaggtaataagattagcattctgagtcttagagagcaattaatcccattaacctacacggtctctcaccactgtccatcttacataggcaggaggtaaaataacactcagcacaaaatagccatgtggttacattctatgggaagtcctaaggtaaggttgtgtctttatatacttactaaatcaaatttgcaccaaatatttttatttgacccttagaaaccttacaataccaaagagatttttctcttaccatacaatctattcatagacccactttctggtttgataaccaagatgagtcccaggtataaagttcacgctttgtaaatcagcaggatttctggttcactgagaacagcctggtacacragtagcaaatgagcagaattggagtttaggactccaaactgtgcagacacagcttagatgtgccctctttgtgggcagcaggtactcatggttgtatctttagccagttgctgctgcagcacaccacttaatacattactgctttagtgaataaatgatatttttgtgggcttgaacagttcatacacatccccagcataygggaagcttacttcccagggtgtcgtcatacttaatgtctggctccctgttaaatacataccccatacttttgttacatcaaggggggtaaatatggggatctactttctaaaccttaaagtactaataaacctcaggtatacattttaaaaattaaatctaagaagttatgacatctacttagtcggaaagctgctctgactgggtgtaaaagtgactgcaacaaaatgaaatcttgatgcttctatttgatactatgattgtacacagaagataggcatgtgtcaatagagaatggtaaggactgtggtcaaactagagagaagaactagagagaacagtcattgtttaaaaacagtcaagtacacctgtagtcccagctactcgggaggctgaggcaggagaatggggtgaacccgggaggcggagcttgcagtgagctgagatcccgccagtgcactccagcctgggcgacacagagagactccgtctcaaaaaaaaaaaaaaaaaaaaaaaaagtcaattacaaattttgtaaaaatgtccagctgaacaaaacacatctgtggggctatattgggtacacaaattgtgagtttggaattcctgatctagcaggataagctacaaacttttcgtatacctatggtggtaagaatgttgcatcacacggtcttgtatctgaaaggtatgctaaaaaacggaaaatgatttctaaactggttggtcctgtaataatacaattctgtttcatgaaatgctttcttcatttgtgctttgaaggttttagctataatgtgtggaatnnnnnnnnnnnnnnnnnnnngctatttggggtacccaaattgggagtttggaatccctgttcttcccggataagccccaaacaggggggaaggtgagggctctgtttccatagggccaaacacgcatgttaattttaggttctccatacctactgatactttaccaaaattcccacacagggatcttttagttaatcatcaaatacaaacttttcgtatacctatggtggtaagaatgttgcatcacacggtcttgtatctgaaaggtatgctaaaaaacggaaaatgatttctaaactggttggtcctgtaataatacaattctgtttcatgaaatgctttcttcatttgtgctttgaaggttttagctataatgtgtggaatagtttattayattcaacaaaattgctaactgcccagtatcttaaagcatactgattatttctagaaatgatttttgaaaaaatattgccatagctatgttaatgtgttattactatgaaaaattattctgtgaaatgaaacattttcatcatctaatcaagttactttcctaagttaaaatatgataaagcaaggattaaattattggctgactgtctttaaagcattaaatatgagataagcatccctttctttctgccacatgcatacaattgaataattatctgtgaataagagttctaatcccataaccccaaacattcatagagcccatcttccagaatatctcattatcttatattcaacatgtccaaaaccaaacacactatatttacttcaaaaccagcacttacttcttttcctgtttccatgaagtcagccagtaagtcagttgggcaataaattaaccatttattgagtactactatgtgtcagacattcttttaggactgaaaatacaaccaccaggaaagaacagacatkgcaccttcctttggggaccttacagtccagcagtgaaatcaagcagtagaaatataagcaggagcacaatggcactataggaaaatcataggttaaggaattaaccatgttaacaaagggctgaatctaacctagcttggggttcagggtcggcttcctggaagaggtgatgtgcttatacttggagcagaaagctaagtgtgtgttagctagagaaggatgaaagagattgtaccagggaacagagaagagaatttcctgaggcagacaaagaggctgtaatttggtcaggaatgagagaagtccaatattgctggagcagaaaagagagagcagaaagatactatatgaaatgcagtatggtccttatccttttagacttgaaacctggaaattgtttttgaactgtcacctcctttcatttctcatattccaaccctaatcatatccttcagatctggccatccatttccatttcccctgctgccactctagcctaagccttcatttctcatctgttgattactttaacagcctagctgctactttttctgctcttagtctttccctgctccaattcattctaactagcagattaaccttcctaaaacctatatttcatttcattgtttcctttctcttaccaaccctcccctgcaaatcctccactggctttctactagattaaagctaaaccctttaccatggtaaaggattcagggacctccatattgaaccacgctctacccacccattttatcttctgagttttctctatgggaaactatttcagtaagaygttctttttattactaattcaacaaayatttattggacactgaccatctgccaagcacagttctagatcccagggatacagagctccagaccrtaggtaaggcccctgctctcatgaaacttataatccaataggagaagacaaacaatgaatgaatggataaatgaaaaaactctcagatggtgaagtagatgctgtgcagagcattagagtgatgtccctgagactcactaggaggctgcactggattaggaagtcagcaaagtcctcttgcaggaggtggcctttaaggtaaagtgtcaatgacaagaagcagtcagccatgggagcaacaggggaagaacatttcaggcagttgattgtggtggcaagcatggaagcaggtagatcagtaaatagtctattgtgatattccaggtaaaatatgatgatggcttgggaagagttgtgatagtagagatggagagaagcatatgcatttggtatatgttttgcaaataaagtcttgtgagtagatgtgcagagagaggaaaagaaagtaatcaaggataatgttttgaattttgtctaatgttggatgaactgattaaatttcaaggcagaataggatactgttgttggtgcttttcctgatgtagcccttcccagctctttctaaaagagatctactgtcatctgcagactacccagtgcttttcatgaagctaaaatgaatctagtgggtctgtggtcaatggccttatttattgtatcaacagagaatggaaagttctaacagatcaacatccctgggaggagatgtgagccttatgccatgctaagatacagtagtcatcttagcagaattcctcatggaagggcaggtggcctcctgtttgctttgtgcaagtgccttttgggtagttagtgcttctctgtgcctcctggaatactgacccctgaggtaaagaagagggagccataaactatatatcgacaacaggttgagaccatctccctggtttggacttgccagccctgtcttcyggtccttttgagtatgtcatttgaatttctgactcagagtctttgtactgttcccaccaactgtrttatatttcctgcatttcatcacctgtgcttgtctttcaaagttcaggtcctgcctcctttgcaagtcctttcttaccactgcagcccaaatgtaattcattaaattaccgtggtgcttatcagagagatactcattttaacacttatcgtggctggtgttcatacagctataagatataaacatataagctctagtttataagcactgaagggacaggtctacatcttattcttatgccaaattactcttaacacactaacgtattggcatgttataaacggcaacaaatagcaaatatttgttgccattgtagatacaaacttaaacttttacatcttttaatcaagtagattaaaaataataagtaaattgataaagtaaaattagatgatgttacaagatattccaattgtaggaattgtttgcaccctcctactgaccgtgacagtaccttaattttttattcattatgccaccaagccattccattggaccacagtagcatttctgggtcgtagaaagcagcttatctatatttgttgaatgaatgaaatacacaatatataagcattagctttatggacaggctgctgcatatgcttgtgaaggttatgtactacataactccagagagcaccatttgcagaggccacgatgtatacaacctaccaaacaagactaggcagtatctgagaaggttcctcttagggcagagggcggcaaagtttcatgagccaagttcatctcactgcctgtttttataaatgaagttttattggaacacaggcacactcgtttgtttattatgttgtttatgaccactttcatactaccatggccaagttgaatagaaactgcacrgctctcaaagcccaaaatattgactatctgaccctttacaataaagcctgctgaccacttagggagacttcttccagttaagaaaaaaacaaacscatttaattttaaaattgcttttactaactgtttaagtgtgaagagtgttttattatggtgttttttccttttcaaagttatcttactcttttgcagtaatgcctgaaaactcaaactttccatatcggcggtatgaccggctccctccaatccatcaattctccatagaaagtgacacggatctctctgagactgcrgagttgattgaggagtatgaggtttttgatcctaccagacctcgaccaaaaatcattcttgttataggtatgaggacagaaagcaaaaattctcataccgttgctgcctttgtttatatatttacatttcaaaaaagtaaatcatatatgtgcaaatagttggataatgacaagcaatagaaacaaaagctcaagggacaataaatggaaatattcttagtataagtttcaataaaatagaaattgytataattatataatctaatgcctattgcattttcatagattcccaataaaaggtcatagaaattctctataatgaatcgaaagtaataccttcaagatttattgtcctgtggttttatttatttaatcttgatcacagataactgagccaattgaagttttctgagagctgaatgtggtggtagtcccagctagtaggcagsctgagccaggaggatcccttgaacccaggagtccagcctgggcaacctagtgagactctatttctagaagaaaaaaagaaagttttctaaacatgatgtgatttttccccctttaaatcaacaaattaaatttttactcactattaactttagagggaaaaataaataataatatattggtaaagattcatataaatgaatcttctttatggcaaattggcacctataataaatccaaagtttcactgttaaaagacaaacaaatctaatagaatagtgttttacatagcacataacatctgagtattaaccaaaataacaatgataatagttcattttaaaagttgccactatgaatcttatgttaaatatggaattatcggccccatgacatttcacaaggaatataaaatgaaaatgttttaaatatttttgaaaaattcctttttggtcaaggagggaggatcacttgagcccaggagtttcagaccagcctggtcaacatagtgagaccctgtctctacaaaaaatttttaaaattagctgggcgtggtgacacacacctgttgtcccaactatttgggaggctgaggtgggaagatagcttgagcccaggagttcaaggttgcagtgaactccactgcactccagtctgggtgacagagagacctcatctcaaaaaaagaaaaaaaaattgtggctatttttgcaaagtctttctcaaaatctataacaatcatgaagagacctgtgaacatgcaacatgtagtcattgttttcacattccagttagaatcacctttcacagagatgaccaaaagcaaaactctggcatgaaataytcaaagctgttctagccrgttgcattaacagagtgtcaaatttatggagaccccatgcaaggaagtagtgcttcagaggacatagcaatgttgacaactaggacaaaagcatgcaaataaacacaccaagctataacaagaatttaagctcaccagactagaaggaatgacatttgtacattttaaagtgaaatgaaaatgaaattgtaaatatatctaccttgaattgttaaaaacaaaattacagaaagagagtttaaagtcagtttttgaagagttaaaatatttttatggctttatggtagccgctgttacgccataaacctctattcttgcaagtggaatacattctttttatgcttaaaactttcaagtccttacatagaagacaaggaaacacttaaataaatgatagaactacagatgaaaaataatcgggaagtatctcatcattttatgatgagatttgtacgtggacagaacacattctttctattttgttgttcttkytgctagtaataaagtattggtcattattaacaggatgaacaaatggaagctcgattgttcatgaaaatggtttgatagcaaattaatcttgtataaaagagcacaaatattttttgtgtgtactatgaattttatatgaaaatgattaaaatatttcaataaactaagatcttcggagaatatgtaaatactcaaatctctcccacttcacatttctttctattcagtgaaatcaactkgtttcccaaagttatgattcttgttataggcttacatgctgtgttgtaacattttatatattacaagaatgatgaagaaccaataagtgtaaataatttcaagaggattgaaacaagggaagaaagaagagggtggatcttaggttgtctgagagaattgggacaattttatgacttttatggaattataaaataattgtacctgaaccttacaaatttgtattagttccaacctaaaaatgtgagagtgaggtatagatgcccacatggtttctcttccagcactgcagaatttttttaaagctggctctcttggaacagatacgaatctctctcatgttaacgtaatcataaaatttcagtgagatggaccctaatatttataagttttagagataagtgaacagaacaaaattaagcccattctggctttagacagaagtaaaattaatttgatagaaacattcagtaattaagctcatccaacaaattaatggcagagaatatctctgtcaattgtgccaatcatattttttgttgtctactattgcctccattagttgacaaaaawttttttttcttgaaagtacaataacattctcaatgtgtctgaattttttaaattaatggagtgtataatctcttagtttggtggttgtgattaagtgtggaaatatagtttctgaaagatacctgattcttcaaggaataaatcagtttgaatttgccaatggaattggtcagataatttttttatttcaagccaattcatgatttgcccatatattagtaggttaaagcagctatttaaaaccaaaacttacttttgatttaaaaaataatctcatagaagtctttaatccattttaattttattttgcatatgacaaagagatagagatctagtttatttcctctgtatatggatatgtagtttttccagcatcatttattgaagagactgctttttacacagtgtgtgttcttggcatctttgtggaaaatgagttcactgtaggtgtgtggatttgtttctaagttctctattctgttccattggtctatatgtctatgtttacattgcataaaactctagaattcaaaggatataaggcaaggacaggcatgagcaaacatttcaaaaaagatttaaataagctgtgtaaatactggtaggcgtttgtctaaaaataatggttacgtttcaccgaattacacattaactctgttggcatggaatctattattgttattttgatcattgttttttatattccacagatttttctttgaytacagagggaaaaatgttagattttacatagaaaaaagtcaagatttctttcaactacactgttcaaaaatttttttaattagctatttgctcaaataggtagaggaaaaacctgtatctctcatttaatacagttggtcaagacaattctttccttgacraagtctctacttgctttacattcaaaggcagcactgagaatgccacaaatggaactgttaaccaccctgtcttggtgacacagaatttgcatcccagatgaagtagtagttgtataaaagggaggtccttattgtatcagaagatcacagttttgcctgttttaaatactaggtggtccaggaagtggaaagggtactcagagtttgaaaattgcagaacgatatggattccaatacatttctgtgggagaattattaagaaagaagatccacagtaccagcagcaataggaaatggagtcttattgccaagataattacaactggagaattggccccacaggtactgctgtataattatcttttattctgcaaaatgttttcataccgattgagtatactaartttaactgtggggtttttttgtcatcctttctgtttataaaaggaaacaacaattacagagataaarcaaaaattgatgcaaatacctgatgaagagggcattgttattgatggatttccaagagatgttgcccaggctctatcttttgaggaccaagtaagaatatctccttatattttaaatgaactactttttgcttaaaattttgggaataaaaacaaaaagacttcttggaagacttgcgatgcttttgaatgaattctggtctgaaaacaggcaaatacatcagtatgggttggcagaaggtcatttctttggcaaacacttaaaaattaaagacagtctctgccaaaaggaaagataactaataatagaattcattttattgaaaaatgcaaatctctctaaaatttatttcaaaatacttttcatacaatttttttttattttgaattactaagaataagccttattcagtactgtccagggatgcaaaacattaccctgtacttayattcatgccaactaaggaaactttcttcaggttgtgaaatactgaaccacctaygtagattaagatagggttcagttgccaaaatttgagtaggctatgcctgctcaacccccaatacatytgttttaaaggaaaataaatcaattaaaatattttatatatctatttaagctttgaaaagcttatgttaattgatttttcattaaaaaaaattaaggctggactcagtggctcacgcctgtaatcccaacacttcggraggctgaggcggatggatggcttgagcccaggagttccagaccagcctgggcaatatgacgaaamcccatctctacaaaaaaaaaaaaccacacacacacacacacaaaattaaccrggtatagtggcgcacacctataggcccagctactcaggaggctaagagagactgagaggcaggagaatcacctgagcccaggacatcaaggctgcagtgagccaagatggcaccactgcacttcagcctgggtgacacagcaagaccctgcttcaaaaaaattttcttttaattacagaagtaatatatgctcatacaaattttaagtctatctgtaaaacgtgaaagtccatcaataccctcccattccgctgctcctcctttcctgagaaataggagtactgttaggtttgttatatattcttccagacctttttctatacttacatgcatacatacatgtatggacacatgtgcacatgctcatatacaaatgcattctaaatttttataatgacttttccaagttatatcaatgttgaatgacagtatctttttctacagaccctttccaaccagatacgattcatgtttaaaatttttgcaaacctgatgagtaaatrgcattttgtgttttaaatttgcatttcatgggttactattaaggttaagtatattttcatacactcattggccatgtgtatttcttccttatgtgaattgcttgttctcctttgcccatttttctacagactttttaatctttttcttatttatttcaaggagcatttaacatattacagatatcgtattaaacagtattaagtaaaatatgatgtcagtttatgcatcacatgaaagaagcctggagttgggcagttcacggccaggggtagctttacaaaacatttttttgaatgttcccattaacggttttggatcacctattgtgctagaatgtctgcctccccttcttaggtttcctctcccaccataagtccagaaactctggtgctcagtcagcttaaaggcttggttctaattgttctggctttgaagagagaaaaactggaaaatatctgatgaagttttgttattgctgttgctaccacattatattgctgttgaaagcgggtgctatggcagccattccatgtgattcttgattattggtagaagtgtgataggcagggaggcaggcattgccacccaaacctggttctcccacccacrtattgaatgtgctaaacttgrtaggtacaagcagatgaagctacttgatttttttttaattgctttttaaacatgctatgttgaatatctttcttttttgttgaattataactcaggaagagtccctggcttttctggtgacttaaaaaacattaacaaaatatctcattttcagctcttaaaaagtccagtccaatctaaatcaaaactttaatttcgtattcactttaacatatatctgctgtccccagcttggaccagattcagactcagaaagctaaggtggtgtatcagaatcctgaaattcctactcaygtgacttgcagtaggtgggagagggagggaagagaggattccctccgaaaagcataaccctctrgtaactctctggatacctgatcaatctacatcttctcttatatagcctagtcacgggtaacagtaccgatttggggtctgttagcaaattctataggatggtctgttatctctatgtagaatgagcagtaacttacatttattgttttcaaccacacttctgaggctgaaaagttccaatttaacatcttcttaggttgacattccagcagcctagaggttctttgccactgtgggcagtacagaggtgtctgaggtcaatgtcatctttgctcatcctgcgggagttaagcgggtgtggaggcaaagctgaaatgtttatgtaaagcagtgtcagggtcagccctgattattctacaccctgtgtaggcttaagcttctggggtgtctttttttctgctaccacttctgagaccaaatgtgtggggtcttccacaccagttctccaattctccaacaccaactgggtgcctaagaattcagttcaacttggacactatccagagttagttcagaccccacaggttaagagcttagttccacaagtctgttcctgcttcagacatcagttgcaagtcccagcaaccacctgtacttctgattgacagtctataaattcaaggtttccataacactctccacaggttgtataattcactgcagtgactcagaacccagaaaaacacatttagtggtttatcataaaggatacaactatattttttttattatactgcatctcctcaaggttttgcgttaacttagtttttgtttgtttgtttgttagtgcaaatgtaggcacatacacacatgccaacattttccccaagatttcctcacagatctggggtgtgagaagaggtgaatttctggtatcagccatatatgggtgatggtcagaccactgtaacaaaagggcctaacacttaaatggcttttaggatgaagaagtgtatttttcttcttttggaatagtctccatatgaacartccagcttgactgggcagcttttttccttgagatcatttagggaccatggttcctcccaggtttttctgccatctcctaggacactgtcactggccgcgtggttgaaaaagtgttgtcatcacatatgggttccagctggaatggacggggaagagaatgtgaaggtctgaagtctcagatctggaagtgacatccatcgcttctgctcacaaggcattgctgagaatttagtcctgttggaactgagaggaaggccgggaagtagagtccagctgggcagccaggtgcctggcagcaatgctattactatggaagtctgggagaactaactagcatcttctcccacagtttgcctctctggccatgcaaatgctcgcctgctcccttcttcccacacatacaatgtactcactcactccccaagtaaaacaaccagagtcccatcatttagttcaaaagtggagaatctctactctatatatagttttcttcatcaggtctagctttgacttctcatactcagccacctggaaactgaacttcatgttatcttccttgtctaccactaataaagagtggaggagcaagcccaggacaatgaaataaaggctcctattcaaaaaaggaaagtttgagaatatacacagtactcactgaaccacagtgaatcctgtwaggcagggattgcaaaggtccttgccctggcagttcctctgagaagttcttccttgtccattatctgcatgacacattgaagtagtatattggagactaatatgctatcctctccttttttttttttcctaagtgacaagatccttctctgtcagccagggtggagtgcaggggcaccactgtagctcactgcagcctcgaactcctggaccacactcagctagttttttaaaaactttttgtggagacaggggctccctgtgttacccaggctggtttcaaactcctggcctcaagtgatcatcctctctcagcctcctaagtgctgggattacaggtgtgagccacygcaactggctgagacctattttaagttaaaaaaaaatgcctttttttggctagaattatgtttattttggtaaaaactgtttctttccaaatttggtagatttcctcycaaaaagaggaaaaagcaaaaagcttccagtccrtgctagtwactatatcataagtccttttccagagatagttattaagctgctttcttttttatcttcccgtttttcctttttctgttcatttttatagattgagggtacaagtgcagtttcattacgcagatatattgcatagtggtgatttctttgctttctcattttaatgacaattagcttcaggccatctaaaacagcaggcttgggtagaaaggcagcatccttagtctaggttttgcttcagggctaggtgccctgttttttggtggtagtggtgggtaaatgggaattctttttgcaatagcctaatctcctgctgtttggaggtatacaggcagttggcttttttaaccttgtaatctatttcttgtaatatgttgctaaacgcagcaaagagcagtcagtgtacacagacactctagctctttccagccatttctttagctatgggctccattggaacatgacctgcctcccaagttatcacagtaataatgatgttatgcaatgacataacaggggttatcaattttccatcctaaaatgtctgtgcccttactacccaagcaaatcaatgtcgcatgttttagtttttttgatatagtagcatgcccccacttatgtaactattggctgtattatttagagtaaatcccaggtgctataatagaaagacacaatgacacagtagcataatacagaaacttatttcccttttatataatggatggcctcactgtgaatgaggggaggrcagttttagtcctcacattcatgcagagatgcggggttttttccagctcattgtctttccaactctagagcaacagctctaaaatttttggtcacaggacctctttacactttttaaaaattgttaaggacctcaaaaagctttcatttatatgtgctatatctattgatattcaccatatgagaaatcaaarcaaattttaaaatatttgttaagtccttcaaaataacaataaatccayacaagttaacttgaataacatatttttagaaaagtaatcatattttccaaaacttaaaaagtgttgagagagatattgctttatatatttgcaaatctctttaacttctagctaatagaagagagttgtattctcatatctgcttttgtattcaaactgctgtgacatcacacttcctgtcgccactgcgaaactccactgtacctttgtgagaaagtgagagtwaaaaaggcacataatgtcatagtgttagtaggaaaatagttttgacctatgaccttctggaaggggtcttgacgatcctcagaggtttaagagcacaatttcagaacaactgccctgggacattgtagacatctgcatgttgaaagctaggtcactgccatggccasgttccagctgaytggaaggggaagagagtgcagaggatctatgctcaaawtcttttttaaactttttttattttaacttttgtgggtacatagtaggtatatatatttaaggggcacatgagatatttggatacaggtgtgcagtgtgaaataagcacatcatgaagaatgggatatccatcccctcaagcatttatccattgagttgcaaacaatccaattacactctttaagttattttaaaatgtacagttattattgactatagtctccctgttttgctatcaaatagtaggtcttattcattctttctaacattttttgtacccattaaccatctctgcctccaccccccgacacatccgcaaccccttattaccgacccttcctgrcctctgataaccatccttttactgtctatctccatgacttcaattgttttgatttttagatcccacaaataagtgagaacatgtgatgtttgtctttctatgcctgtcttattttacttaacataatcacctccatccatgttgttgcgtatgacaggatctcattcttttttatggccaaacagtactccgttgtatatatgtaccatattttcttttcttttcttttttttttttgacatggagtttcattcttgttgcccaggctggaatgcaatggcacaatctcggctcaccgcagcstctgtctcctgggttcaagcrattcycctgcctcagcctcctgaatagctcagtttacaggcatgcaccaccacgcccaactaattttgtatttttagtagacacggggtttctccatgttggtcaggctggtctcgaactccagacctcgggtgatccacccgcctctgcctcccaaagtgctgggattacaggcataagccaccatgcccggccttatgtaccacatttgctttatccattcatctgtggatgaacacttagtttgcttgcaaatcttagctattgtaaacagtcctgcaacaaacataggaatgcagatatctcttcgatatactgatttcctttcttttggctatatacccagcagtgggattgcagaatcatatgggagcttcatttttagttttttgaggaacctccaaactgttcttcctagtggttggactatttacattcccataaacagtgtacgaggattcccttttctccacatcctcgtcagcatttgttgttgcctgtcttttgtatataaaccatttaactggggtgagatgatatcttattgtagttttgatttgcatttatttgataatcagtgatgttgaacactttttcacatgcccgtttgccatttgtatattgtcttttgagaatgtctattcaaatcttttgcctgtcttttgattagatttttttctrtagagttgtttgcgctccttgtatattctggttattaatccattgtcagaggggtagtttgcaaattttttttgcaacccaccattctgtgrgttgtctttttactttgttgcttgtatcctttgctgtgcaaaagcttttaaatttgatgtgatcccatttgtccatcttttctttggttkcctgtgcttatgggatattgctcaagacatttttgcccagaccaatgtccwggagatttcccccagtgttttcttttagtagtttcatagtttgaggtcttggatttaagtctttaatccatttttattttatttttgtatatggtgagagataagggtctagttttatttttctgcatatggatatccagttttcccagaaccatttattaaggcagaaagagactgtcttttcccaatggatgttcttgatacctttgttgaaaatgagttcactgtagatgtgtggatttatttctgggttctctattgtgtttgattggtctatgtgtctgttttcatgccagtaccacgctgttttggttactacagctctgtagtataatttgaagtcaggtaatgtgattcttccagttgtgttctttttgctcaggatggctttggctattctgggtcttttgtggttctatatacattttagagttgtttttttctatttctgtgaagaatgtcattggtattttgttagggattagattgaatctatagattgcttgggtagtatggatattttgacaatattgattcttccaatccatgaaaatggawttttttttcattttttggtgtcttcagtttctttcatcagtgttttatagttttcattacagagattgtttggttaattcctaggtatttaattttatgtgtagctaktgctctagctaggacttctagtactatgttgaataatgatggtgacagtaggcatccttgtcatgtttccaatcttagaggaaaggcttcagtttttccccattcagtatgatactagctgtgggtctgtcctatatggcttttgttatgttgaggtatcctccttctgtctccatttttttgagggcttttgtaatgaagggatgtttaattttatcaaatgcttttcagcatcaattgaaatgatcatgtgatttttacccatcattctattcatatgatgtatcatgttgattgatttatgtatgttgaaccatctttgcatcccagagataaatctcacttggttatgatgaatgatctttctaatgcattgttgaattcaatttgctagggttttttttttgtttttttttttttttttgaggatttttgcatcagtattcatcagagacattggctcttagttttcttttttttgrtacgtctttctctggttttggtatcaaggtaatactrgcttcataaaatgactttggaattatttcctcctcctctattttttggaatggtttgaatatgattggtagtagttcttctttaaatgtttggtagaattcaacagtgaagccatctggtcccaggctttttcttaactgggagattttttattgcagttttgatcttgttacttgttactggtctgttcaggtttgggatttcttcytgataagtggcatgcatctcagaatttgttcatttcttctagatttcccaatttattggcgtatagctgctcatatcagccactaatgatccttgaatttctacagtatcagttgtaatgtcttcattttcatttccaattttatttatttggatcttgtctcttttttttcctagcctggctaaaagctgcaaatattttctttgtcaatttcattttacttttcaaaaaaccaaatttttgtttccttaacyttttattgttttttcatttcagtttcatttatttctgctctgatctttatttcttttcttctactaattttttttgtttgatttgcttttgcttttttaaaattcaggatgcatctttagattatttatttgaagtctttcctgttttttgatgtaggcacttatagctataaacttccttcttaatactgcttttgctgtatcccatagattttggtatgttttgttttcattatcatttgtttgaaaatttttttcagtttccttcttaatttcttgattgacccactggtcaatcaagaaattatatttgtataattatatatcacatatatttgtattttttccagaattcctcttattattaatttctatttttattccattttggttagagaagatgcttgatcttatttcaattttttaatgttttaagacttattttgtgacctaaaatattgtctgtccttgagaatgatccatgtgctgaggaaaagaatgtgtattctgcagctcttagatgaaatgctctgtaaatatctattagatacatttggtccataggtgcagattaagtatgaagtttctttgttgattttctgtctggaagatcttkccaatgctgaaagtgaggtgttgaagtctccaatgcttcttctgtgttctccctcccctggcacccagagaggctctcagaactacaccgccacttccagggatgagggaggagtggcatctgcaatttaggactgttttttctatcttgtcagtacttctttcagcaatatgaagttaaaaccaggtactgttagtgctcacctggttttcrgttttcatgaaggtgttttttctatatagayagtcgtcaacttggtgtctttacaagagggacgatggtggagctgtctattctgacatcttgctcygcctcaggtgatgctcaatttcttaagtcccagacacatcatttctcatgctccattgatgagaatttaagtcacatggctttatctcgactgtaaaggaggtgggaaatgtgatcaagtggtcagtcatgggtctctacagagctgttatcatggaagaaaggaaaacaggttttgatagacaactaggagtctaccacaagccgcttgcagtgcatagcrccatttttccttacttctcagcccaagagctggactctcccagtccccaggcctgtcattttaaaagaagaggaggagataagactgtacttatctgccatagtagccacctggccctacttcttggctttgtatagtagtttctccaggagatggagcttgcagtgagctgagatagcgccacggcactccagcctgggcgacagcgagactctgtctcaaaaaaaaaaamaaaaaaaawctttttctcatcttttggcctgattgtttaaaggttagtgaggggaaaggaatcaagatgggcaagcatgggaagtctaagatcttttcactgccaactaaacatgctgctagccaagatttcactagatagcccagagtccacagtgacaacctaagcgatgtgtttttaaaaggttatagaatttcgtatttcatggaatgggagtggggcgaaaaggtggatttccatagggaggttttattaaccaagcagtaaagctgaaactaataagagctccatgacgttattattgaaaatggagttcaaggccagcctgggcaacatggcaaaactccatctctgcaaaaaatacaaaaattagctgggtgtgatgacgtgtgcctatagtcccagctactcggaaggctgaggtgggaaaattgcttgagcctgggaggctgaggctgcagtgagctgacatggtgccactgtactccagcctagctgacagagtgagacactgtcttaaaaaaaaaaagacaaccgagcaccacatgttctcacttataagtgggagcagaacaatgagaacacatagacacaggaagaggaccagcatacactggggcctgcagggtggtggggtcgggggagggagaacattaggaaaaatagctaatgcatgtggggcttaatacctaggtgatgagttgacaggtgtgcaaagtactgtggcacacttttacctatgtacctgtgtaacaaacctgcacatcctgcacgtgtcstggaacttaaaataaaaataaaaattgaaaaaaagaaagaaaatgaaggagggaagtctatagcaaatctataaacacacacgaacactcaaattgatcrtgattaacaatatattcaactatctggtcccaactaattttccagttttatrtacctgtctacacgttcgacatgctgtaccacttcctgtttttcacagtgatctgctcctgctctttcctcagtgctatttatataattctataacttgcttttatcactgtgcattctgtttttgagcttatctgtgttgatacatatagacctagctcatccttataacgatttcatgttacactctataaatacattatattttattagtgaactttcatgttgctttaaaatttgttttatcatcagtacttacctttttattttatttatctgatggattagaagtgtttctgtatcactattttaatttgcattcttcaaattactagtgaactgaaacatttagaaatgtgttttttggccacttgtatttcattttttgagaatttctaaaacataaccctgcccccactcttttcttgttagattgtttgagtttttaaaatcgatttggatgttctagatactaatcctttgctacatatcttataatattttctttcatttatattttttctcagtcatgttcgagatatgttttgtcctgcagaaattttaaattggaattggtgtatttttcattattttccctttggcttttgcatttggatcttaagaaagtgttccccatartctcataaaaatcttctatagttttcyagttatttttagttttgttttaaaggtccaggtatttattctatgtgcactaattcttttgyatagtgtgaggtagcaatataactttattgcatgttttgaatggaaatgaaaaatgtatycagtggtccaaagaacgtttgttgacttgcgcatcttttccttcattgaaatgacttattcctgtatagacactggtctgtatatggtttctctattcagttctttcttctgtttatatatttctgcaccaatatcatggttctagttgaagaaatctaaattatatcctgatatccaaagaacaatcccaccccttctgtttttttgktttttatttttttttcttttgagacagagtcttactcagtagcccaggctggagtgcagtgatgcgatctcggctcactgcaagctccgccttctgggttcactccactctcccgcctcagcctcccgagtagctgggactacaggcactcgcaaccacgcccggctaattttttttgtatttttagtagagatggggtttcaccgtgttagccaggatggtctcaatctcctgacctggtgatccacccgcctcggcctcccaaagtgctgggattacaggcatgagccaccgcacccggccctgttcttttttaagttaggtatgcctatacatttattcttctttataaattttagtatcagtttgtcagattctgctgagattttgatttgaatttcaatatagattatattatgtatatagattaattttaagagaactcacatattcccatccatgaacattgtcatgtcactctgtttattcaagtctagctttatgttcttcattaaataaggttttataatttttcatataaatatcttgtatggttttgttagttttgttcctaaatataatcgtttataggtttgctactattgtgaatgagctacttttttctaaccaattcttaacgctccatctttatagaattattgtttgtgtttgtgggtatgtctgtttgtctccctagacagccttcttttctgttctctttacggcacagctgactcattcatgttgtaaacttccttcttttcttcttcccttcttaccactgccaccttcaggaccctcacacctgcctgccaacttagaacattcctttactacactgagttctattaaatgtatgttgatttgaagtggcaaataaatatttgtgtcatggatattcagaaaaaggaaagattcaagtggctgcataaaaagtgatcttgagtttaatttctgagattcttatttctcagctcctcatataaatcaatagagttaattatagcatcagcgaagtatagtagtttgactctcattcaatgtgtactactggctaatttatggaccctcttgaagcctcggtgtttgcctttcaagaatgagaataataatgtctcacaagattattgtgaagattaaatgatataaaatatctatagttctagtacagtttgtggctcatggtaaacactcaataaaagaaagtcgttattgtcgttagaccatattaaagataaacactccatagatttataaggagaagagccaactcttccctttcttttgtcagagctttttccccctgatactgaatccattactcattgtcagaggctttgaaggcagaagaaccaggttccttctagggactgtttttcaaattggttgatgaaacccttagaggccactttgaggtgttaaaggctgcccagaacagttctgattttgttctgttctgaggttccatgtaagactttgaagaaggttttcaactgctaagaatggctggaaaccactctagtgatctgtcagctggagtcctgggacattcacaccactgggcaagaagcatttagaagcccactaatgagcacaacccatttccctcatcccttcctcccctacagctcctgaagcaaaaaagaaataataattcgttattttcggccagaagggatgataatccwgagttccaaaataagtccatggtagcagaagtaatatttaggaagtacgtgccaagtgccaggcacctagctgtggtttaaatacatgattayaattcacgtcaattctatgaggaagttgttgacaatcccgtctctaaattagcattgggtggtctcacttcttctaggtacatggatatgggttgagttgtatagtcgctgtgcccttcaccataatcttctatcaactctgccttctaagaattggttcctaaagcaatctaaggctggacatggtggctcatgcctgttatcccagcactttgggaggccgaggcakgtggatgacttgaggtcaggagttcaagaccaggctggccaatatggcaaaaccctgtctctactaaaaatacaaaaatcagccaggcgtggtggcacatgcctgtaatcccaactacttgagaggctgaggcaggagaatcacttgaagccaggaggcggaggttgcagtgaggcaagattgcatcaccacactccagcctgggtgacagagcragtctgtctaaaaaaaaaaaaaaaaacaaaaagtcccttaarcaatctggttcattcacatcaccacggatgcaatcagcacagacaaccacagagctgaggtgttcttaaatatgcatcttggttttatatatttagtgtaacccaaagtccctccattacacgtactgtctttttttccatccagtttttcttccagtttttccctctgaggggttgatcccacagtgctgccttcttccctgtcctaattaggcttgtatattcacttccatgtgattttcatgtgaggagtggtttcgtgtycccagctgcctttyaagaacctatgcagaccttccttcataatgatgctggctagttctcttccaaatgtgtaccaaaaaaattatttctgtgaccccaaatgttgcaaagatccagacttcttctttctattgtatttatagacactgattgatgttaaactgatctggtttttccaccatttctgtatttwttttctgtttttggtacaagcaaagtatattgtttctacaatagtatttatatttgaatgtatacattttattcctgatttttatcatgttatcactttactccccaagattagctgtcattattccactttacaggtaaggaaaccaaggctcagatgataacttgcttaaagccaccagcaggcaagaacagagctaggcttccaatcttggagggcatacagactctagaccactagctttctctaaccttgaggtcacaaacaggcagccctgaggctgaatgtgggctgcagacaattttttaggtgtgcaccaaattttaaaattgggaggttaccaattcaaaagcagacttttgcttttcttgaaaattttggagatttggcagctttgagtctacattcctacatgtgtgtagtgtctgttgttaggcaaggtaggtgctccccagttcacagcagcttccctccctccctagcccggccctctctctcctttccatcaccaacctggtccttataaggcgatggagtccatactctacagcacaccctgtcctcccctgtctcagttatggccctctgctggcagaactgggtttgtgggtttgctttccgtaccctgtggtaccatggcagctgctgccgtgattcttaggatcctgttacttcttttacttctttttcagtacagcctacgccctcagacaaagatgcctgtgcagtcagatcctctcccttacgctgctccctgcggggtatgtccagtccgtcaagattctccctaaagacacagcctgtaagaaagcagaagtctttgcctctgcctgccacatatcttccttgaggcaatgaagtacagagctggctatttgcttgatggacaaaggggaagagggggagaaataataaaataattgtagtcatagtaatgacaatattgaacatatattgagaatttgctatgtgccattgttctgaacccatatatgttaatatattgatgttaatcctcaaaacaatcttatgatatgaattgaagagtygttctaattttatatgtgaggagatggaggctacgttttcaaggaggctggagaatctgctccaagtcacatgtatcaagaggcagaggtggtatttgaaccaggctaagcaggtcctgaggcttcagtcttaactaccacctacttttttagaaacatagattaatatgccggaatattctctagctacaattgttgggcttttataacctaaaatcaactcatactaaatgaatcaaacaaacgacaaccaaaaaaataaaaaaaaaaaagaccaggagaatggaccaagaaatacagatgatataaacacaatacatttaaagatattattttttgtactttttaatgtagcttaattttttaattgatacacaatcatatatttatggagtacagaatgatgtttcaatacatatagtgtatggtgatcagatcagggtgattagcatatccatcatctcaaacatttatcatttctttatgttgggaacattcaatatcctccatcctccttttagctatttgaaactatatatttattgttaagtatagtcatcctacagtggcatagaacactagaacttatttattcaatctagctataattttgtaaaggtactgtttaattctagcaggagaataaagtgaatgggagagaggcgaacacctgtaaggtccatagtattccagattatgaaatgacacagatatctcaggagaagatgagagcttttcacataatcattccaagaagtttcatttaacaacagatatttattgagatgctatcatgttctaggctattgtactttgtcctggaaacacaaagatgaatgaataatgtacccttacggtaaaatacgtgtacatataatcatgcataatagagtataaatacatacaatgattagcatatggtctcycatttttttaaactttaatttcaaatagacaacacatttaggtagctgaatattttaaggatataaaattacatacactggaaactctctcttattcttgtctccaggtaccttcccagaaagcagacaccttatccttccagagatattttatacaaggaaggatgtgtatagattcttgctctcacatttttgtttttttcacttaacacatttggatattattcgccatacttttttggtcatgcatactaccagtaagttatttgagcccttagtatacattagaaagtgaattataaaacatagagaatatttaagaaggagaaatgaaggtgaaataaccaataattttagcaatttatattctattttagtataaaaatgattttatctcactaacattttaagcacaatgtgatttaaaatgaaactactttgaagaaacttggttaaaactttatgaaataggattcaaagatttgattaaaaactttatgagacaggattcaaaggtttgattaaaactaaactgattggatagtgatacttgattttatttgttgttttgtcacaaaaaataaaatgtatcacaaaatatgtagctcctatgtaggcgacaggtgactgatacagtgggcgccacaatgtcagtctttatgccaaagactggtgaagcttaatttattctgcttgttaaatttaaaaagtcaatttgaacagaagatataatatttctttttgcaccccaatttatcatctcgagccatcctcctggatgtgtgcaccctacttaaggaatcccgggctagggaatcaaacatgtctgataccaaactctcagcaatcttgtggggaatgactgaaggaatggtttctttaacacaaattcaaactcctgtcgaaagcagcagttcatggtggtgcttttgttttctaaggtgtgaagtatgctgtttataaaagtactgatgcttggtgctagcagacacaaagcatttttaccacgatcatagtggagtggtcatgatgggaagggactttaaagcccccatgacctcctaaatgccactcttactcagttgcattccttctggcttcttgagtaagacagaaaggactccaggaattgtgcttaggaaggttgtggccctggagcaaacacagcccttgtgaactccatttgtcatgcatgcattgtgggatgagagagtgaggcctgctgaagcatgtagaatgactatctgttcattttttttttctttttctatttgtgatttcctctaggatctgtaatttagcctcagcattgccatttaaggagtctaaaatagagtaagttctgagtttgagtgagtgagagtggatatatgaaaaattctcaactagataaatatggttttttaaaaaacgttagagataaaagaaaattaaccctcagagggctatcatcctacttgcatagtgaattgatttgacaaactcataatttgatttgctgtgcctaagggagacaaatttgatttcctcctaagggagagtgatttaattttaattatgcaatatgttttctaagcattagcactttcatgaaaatattaaaagaaaatgttgatgctttctcctggaactaatgacttagcttgtttataattatttaataattaggttttgaaattgataatatgttagtagaagatgattattcatttatttttattgcaatttgctgtgatgctacaaaagaccattaaagttaaaaggctgatgagatatttataattgccttatgccaagtggagagtcaatatccaaacttkgtgtaaagataaaattagagtcatctttgattttgccatgtatatcaaggcatggttgctgcataacgaatcaacccaaaaacttactggcttaaaacaacaatatttataatttcacgtgctttatatgggtcaggaaatcaagaactgctsagctgattggtttcaactcagcatcgcttttgaggttgcatttaaatggtgattggggttgcagtaatctcaaagtcttctcaatctgtatacctcatgcttggtttgggaagactccaactgttgagtgctggaacagctgaggctcctcaggcatctcttctcatctctctgcatggaagtctcagggtagctggactccatagcagctcagggctctaaaggcattaacttgagagagccagaaggaagccctatcaccttttgtaacctagcttcaggagtcatacagtgtcgcttctatcactttctatttgttaagaatgagccactgagactggcctatattcaaggggaagggaattagaatccactttttttttaaataggaagagtgtaaaaaaacacttgttgacatgttttaaacccccacaccataaagctcaataaataataaatacctgcccatttttcactttgctgatatgtgtcccttcccttcattttgtttcttgctcatcttttcatgccaggtgttcagtcccatctatttgaacttttagagtcttctcttaactaccttccctgtcctcattctttccacatctagtctgtctgtgtcctgtggccagactaatctttctgaaagaccactgccattagttcacccctttgattgaaaacctttcatgacaattattgtccacaaatatgtttctccttctatggtttgattcagaatcaagtacatgtcttgttaaaaaatgtgtattgtccagtctccctgagagaattactgaattagaatttctggtgagcggaacccaagaatctgcaagtttacaaatcagcaacttttagtaacgtttattcttaaacacattagcatgcaaactttagtctataatggcacacagcaaagattctcagccatagcatgttgtcatagttatgaaacaagtggtctgttgcgaataatagtgaagcactgaaattggagcacatccatcattatcccaattgtattagttcattctcacactgctataaagaaatacctgagactgggtaatttatatagaaaagaagtttaagtggctcacagttccacaggctgtacaggaagcatggcagcatctgcttggtgtcaatcatggcggaatcttaaaggggwagatggcacttcacatggctggagcaggaggaagaaagagaggcggggagatgctacacacttgtaaacaactagatcttgtgagaacttactcattatacaggagcaagggaggatgctgctaaaccattcatgagaactttgcccccatgatctaatcacctctcaccaggccccttctccaacattggagattaaaatttgacatgagatttgggtggggacatgattcaaatcataacatcagtaatgtcaccttcactagtcttcacactttctgactggaagagaaattccttagactatgaggaatttcaagtaagatgtgttcccagtattaatgtcattaggtgcatgagtctccatggaatcactaccctaaacaatctgatttgaacaatccgatttgagcaggacccggcttgttttaccagtgtgccttcaatacactttgttcttgctccctcactgcttgtctctcttcagtgggtctttttttttttctgcttgtccagtctccccttctcttggacatcttcctttaggaccctaagagttggagatttctgtctactctccacttcttcagcaaattatgttacaatttacaatatttatatgatccttatcgtataatgctttatattgctaattattagttcatcatattgctgtgtcaggttccagcaggaaagcaatggcatactcaaataggctgaacagaagagtgtttaataaaggtgtgcataggacatgaggaaaaaatggaaaggtatgtgtgggacaaacaacaaaagatagttcaatactacagggctgctggaagtgggttctgtttccatcccaaggcctrtaggttcaaggaggaggagtagttacttcaacctagaaaaagacagatgtatgaagaaaggttccttataggggccttgacctttagtagagagaggtagccagctcatgatgattccacaggatgagagccaagggaataaatttcaagactttcctttcctcccttcctctgatctcctactgatgcttaccgttggtcaaaaacagctgcaagccagagatcaagagaactgatttatacatttcagaagagtcatcagggcacagaattggggagagaatggtagagtagagctagaggggcaaagggaaaatggataacacaatcagatttattaagggctgaaactcttttatctactttttgtatttctcatggctctgcaaggcactgcccacagcagttgttcaatgactgtgtcttcattcttttatgccagcacacactggtttgattcctccagaatgcctcataaggatgagtgacaaaaggctgcccagtggtaacattttgtattttctgcaccaagattcactcaaacataaactattgtatttccttaatttccaggcccaatttccttaatktctttaatagaaaagaccagtttcttgagaaaatgcagagacagttataatttggatatcttaagtaattgccaaaaatataaattcaaattaaactggctgtcatatatgttggaagtccaagatactattctcagatcctactgatttagtctcactgactataagcacattgcattctgtgaagaatgattatgtgtacaagtgtkccccacgttatgagaaaaatgttagagatgctgaatttctaaaatgaataaacagggtaattgtttattctacagaaggtgtattagtccattctcatgctactatgcagaaatacccaagactggtaatttacaaagaaaagaggtttaattgactcacagttttgcatggttggggaagcctcaggaaacttaaaatcatggcagaagacaaagggaaagaaaggcacctttttcacagggcggcaggaagaagtgctgagcaaagtggggaaagccccttagaaaaccatcgggtctcatgagaactcagtatcatgagaacagcatgggggtaaatgcccccatgattcaattaccttgcatctggtccctaccttgacacgtggagattttgggaactacaattcaagatgagatttgggtggggactcagccaaaccrtattggaaggatttctaccataacggaaagattaaaatgggattttcattatgtgggtagaaataagcatacttcatttttacaagagacactttttaaacaattaaaaygcagattgaaagtaaaggattaaaaaggtataaccaagccaggtgcggtggctcatgcctgtaatctcaccactttgggaggctgaggcaggtgggtcacctgaggtcaggagtttgggaccagcctggtcaatatgrtgaaaccccatctctactaaaaatacaaaaattagccaggtatggtggtgcatgcctgtaataccagctactcaggaagctgagacaggagaattgcttgaatccgagaagcagagattgcagtgagctgagatcacgccattgcactccagcctgggtgttgacaagcaagactctgtctaaaaaaaaggtataccatgaaaacactacacataagaaagctggagtgatgttactgacattaaagtagacttcagacagagtatcaccagagacagaggaatactccatagtggtgaatgcatcaattcatcagaaagacatacaatttataaatgtgtatatacctaataaaaagtttcaatatccatgactcaaaaattgatagaaataaaggaagaaatagacaaatgcaaactcataattggaaatgttaacaatcttctctcagtatttaatattaacaactaggcaaaataccagtacagacatagaaaatctaaagaacaatagacatgtctagaacactgtatcaaacaactgaataatgcacagtgattttgagtgtgtatggtacwttcaccaagataaaccatttactaagccattaatacaagtctcggccgggcgtggtggctcactcctataatcccagcattttgggaggctgaggtgggcggatcacctgaggtcaggagtttgacagcagtctggccaacacggtgaaaccccatctctactaaaaatacaaaacagccaggtgcggtggtgccgcctgtagtcccagctactcaggaagctaaggcaagagaatcacttgaacccgagaggcgtaggttgcagtgagctgaggtctcgccactgcactgcagcatgggcaatagatagagcgagactccgtctcaaaaaaaaaaaaagtctcagtacattttaaaagcttgatgttctttttgatcatagtagcagaaaaagcatttgacaacattgaacataagttcattaaaaaaccagcaaattgggattggaagggaattctcctctaatagggagcatctacaaaaacctatatagctaacgtcatacttaatggtaaaatgttgagtgctgccccctaatattgggaattgtgagggtgtcggcttttaccatttctatttaacgttgttaaatagaagtagtaaaaattctaaatagtggtctgagaagttctaaatagtgctctgagacaagaaaaagaaacaaaaggcataatacaggaaaggaaggactaatattgtctatattgttgaaatacatgattgtttacaaagaaaatcctaaggaatctacaaaatgtgtaccaaaactattagttaaatttagcaaggtcatggaatacaaggtcaatttactaatcaattgtatttctatatattagcagcaaatttttrtgtactatgaaaacagggtgagccgtgtctagcttattatttaactttccatgatgattatttcctaaaatattgactgagaagaataatatctttatttttaaaatagcattgtttgaatacatagtcatgggtatttgtccaaatacgtggatgggatagagggtgatatgcttgtgtttgcatcagaagaatgaatagtgactaatttactaatgtggtgagtagcccttgattataggatttaatctgtttgtagtccttttctttttttcttctttttttttctgtgagtcatggcctaaagaaattctttcycttcattctttaactaatggtctccatgagtacattgattcatagaagagtaactcaagcacaaattttaccggctactttatctggcttcaggtgactggtggttcctccctctgggggttgctgagtcattgcagaggaaagcaaacctaggcaaacagaagcattttctcaatcaactgatgccaaaagtacagctttaccatgtggagattcttgggattttaaaaaaagcaaaaacaaagacaaaaaaactttaaaaacggtctttgaactaaaaaagattggtagctactgatctcattttgtaaatgagaaaattgagtcccagagagattaaatgactggctggaattcacacatctagttaacgtgagagctaaattacgcaccttactgtcttttctccagtgctctctccacccaactatactatctccctaagcaataaaaaaggtcgatctagtctcaaaggactgctgtttagattcagaagatcctgtctgaagttagatcccaaaatgctctgagcagtggacaacatattaaagtgaatttttaattttccaaatgccctattttgtaagagagaatgcatttagtttcacagagaatgcatttagtttcacaagttctgcgctgtttatttcaaaatctttgtttttcttttctttttttttttcttttgagacagaatttcgctctgtcacccaggctggagtccagtggcacaatctcggctcattgccacctccacctcccaggttcaagcagttctcctgcctcagcctcctcaagtagctgcgactacaggcatgcaccaccacgcccggctaattttttttgtatttttagtagagacagagtttcgccatgttggccggactggtctcaaatgcctgacctcaggggatctgcctaccttggcctcccaaagtgctgggattataggtgtgaaccaacgcacccagcctgtttttctttatagtcatctccttataactgtttcccatgcatgtaaaagagtttttaaatagcatgttgtctgcttcttttctgctgagtaaataaatttgcatttaagaaaacaattttgaatttatataggagaaacatctccttaaaagtaccataaacattagagcaaattattagagccaatcattgattcttcttgtctgaaaagttttaggaattctttaatattatttttgtacatataaacactcaatatttactgaatgaatgatcgaaatgaacgagcaaatgaataattagaatgaataatggtttaaaatccctagcaggcctttccatatctgaacttctttgctttctattataatttaataataagccttttggaaattaactcaaatatattccacttgaactaccaaatattctaataaatatcattctttagtcagtgtgtgtttatgtatgtgtatgtgtgtgcatacatacacgtgtgtgtagatagatataayacacacacagagaaagaaatagaggagagaaatatttggaaagggtttccagttcagattagtttctgtccaaatcactcatacatttccaaaaataaggaaacaataaagcaccaaatcaataatctaaaaatatcctgtgagaatgattacatttcagtgctctggctccctgctggagcagaagaccagggtgaaagcagctgctgctgctgctgcagccaacagagactcaaaagtctgggttcaactcaaggcaccagcacaatttgaaaagacccgttcttataatagctattgccttgtagagccttggcaatctacccatttactaatgagaaagtagggtgaagattagcctgctgaaaatgccgaacattaagaaatggcatgaacaatgttaggaaataacttctctgattttaatgaaaatgtctcttctgtccaccactgctttaaaaattcaattaattaagtgtggaacatattaaaaaaaagttcaccaccatttgcgtgtgtgtgtgtgtgtgtgtgtgtgtgtcttactcatggctatagaataagactaaaactaattttcgtgtatgcctatagagccacctcatttatgtgtataaaccaatggtggcaaaaagatttcatcttgtgtaccacattcaaattgcaacgactgcctaacccagtatgctgagaaggattctgaagctgtatctaaagtgcagtgataattagtaatgatgattctctgctcatcccagatataaacccacctgaatggggccacaccccccaggatgtagaccgcagagttaaaccatttgaattctcatctcagatgttctagaaactctgaatctaccaagacatttattagatctttatagggaaaaaaaaaaaacctctaccctcctcctggaagtagggttgtagttaaaggggcatgrggcgagatggggaaattgttgaacagagactgttcctgattgtctgaaggagacttgatttcatgtattctgcagatcgtttcattgggtagtctctcggcttagcttcctcttctggatgtgatggtggctaccaggccatcagcctctaacttgaagcttgaattcatcattctctattacatcagagcaatttagagctggatgtcagattacgagctacttttttttttgagacggaggcttgttctgtcatccaggctggagtgcagtggtgcaatctcggctcactacactgcaacctctgcttcctgggttcaagcaattctcctgcctcaacctcctgagtagctgggattacaggcacatgccaccatgcctggctaatttttgtaggttttttgtttttttttttttttgtattttgtattttttgacggggtttcaccacgttggtcaggctggtctcaagctcctgacctggtgatccgcccacctcggcctcccaaagtgttgggattacaggcataagccaatgcacctgaccaccactttttaaatacaaaatgcaactattatattkctggtagtagtagaataaaatctcactaatgactgatagaaaggtaatttgattatatcatcagggtttctcacagacccatttttgcctgccaggacacaaccttggatgtaactccttattttcttcctctccctacacacttttacgggaaaagcagagtcctaaaaagttgctggggaaagacaacatgccatatgatcatgtgctgctcacgtcgaccacaagtttccagacctcaaggccctcttctctacctctgttacaccctgtgctggtctccattttgggactatattccaatatagtgaaacttccatacaattccactgtattgaaataatattttatgtgtctgcttctacartggattgggagaaccttgtggggagggactatatcttgcccattttgcatctctttcatctagtgtggtakttggctcatagcaaatgcttagtaaatgtttgttgaactgaagtggacacctatcagtgcatttccaggtggttttagaaccatacttgtcagaaaatgtttaaaaagaaaaagaaatgaatgaagaatagtgagctagtttaacctgttaaaggtacatattaaacaattaataaatgtttatggattggagtggaaaaatgagtgattcttccttaatgtttcytatatgtaggatgtgcaagaaaaatttgagaacaagatgcactaaakatatattatcaaattatggctggactttaggtgttacttaatgcctcaaatattggctgatgatatgtttaaattattttttcattaccaatatgaaagaggagagttattctgagataactctctgagataagcggagagatctggttaagacctaatgaatagagtgcaataccatcactcctccatccattaataacttaatagccttatgaatttctttggagacagtctttgtgtttgagtggtaagaaataaatgtggataagtgtgaaatagractatattaagcatgaatcttcttttgaagtgttagcttctttcagctacgtaaatcaaagtaacttattcctaaaaaaaagataccagtttgcctttggaataacaccaaagttttttttttttaaagtactttcatgtaagtttcaaatggaaatctttaataatgacattttgtgtcaagtttttagtctattttccattcagtaggtttgtgcatgaagtattaatggtgctatcacataatttctcactcttttgtattctcccattatcagttcacatttaatatactctggagttttattttcctccaagaaatgcttttaaaagatttgaaaatgtgcttcttcctttaagaatgtctaaatcacttttctaatacttcctttgaatagatgcaatatgtgtgaaagtataaaatccagttgtccaaagtaggtagatcaaggagaaataacactgttatttcttttttaaatgaatacaatgaaactaaagatacatatttttagttagctccaaattttttttgaagattaattgctatgcagattaaataggaatttggaccacatgatctttaaggattcttctcaatctttgcttccatgaattcatgaacatagtagtcaatatacgtcaggattgtgttcacataccaataacagaatctcatgggcaatcattcctatagtcaatatcatgaatttaaatgttaaatgtttgtaagaaggcaggtagagagagctggcttagaagtttgctaaatggggcagggtgcaatgcctcatgtctgtaatcccagcactttgaaaggccaaggtggcaggattgtttgaggccaggagttcaagaccagcctgggcaaaccaggaagaccctatctctacaaatacataagtaaataaataaactgggcatggtggcatgcaccagtagtcccagctattcaagagctgaggtgggagaatcacctgagccaaagagtttgagactgcagtgagctatgattgtgccactgcattccagcctgggcaacagagcaagatcctgtctcaaaaaaaaaaaaaaaaaacacatacacacaaagaagtttgctaaatggtgacattaacaacatgctgaagaaaatctctgcagtgatttttcctggctgagtctggcaacatcggccaacattatcgtccagtcatttgactgcttcttaatagacactgtttgcagtttattcaatcatgcattacatgcactagtaatgaggaatccataaactgatcaccatgaaccaggcaggcatagctcaccccacaggtgtagaaacagctgatgtattttttaactttactcatttgccttcgtttctccctcccctccaatttcagaaagttattttgtctaatctcagtgctgtttgcctagtgttagcacttatggtcataaagatcatgttttacattatatgttatttgccctctattcataaagggcacataattatagacagttcaggctcattagctcttccagatgatctgtttgcctctagtctctccccatccagtctgctgcctgcactgccattagcactctaaaggacaaaataaaatatattactcccatgtatatgaaacaaaaccccagctgcttagcatggaagacaatgccagcccatctagtctcagtctacctttccagaacttcacttctagctcataataggatcctagtaaatactagctgaataaatgtataaataaatgaaatagatgcctgaataatcaagttagcagtgaggaaaagacatcttggggaaaagaaatagctttgtaactttacattcatttccttattgtcaacctggtatatactattcattaaaacttcaggccaggtgcagtggctcacgcctgtaattgcagcactttgggatgctgaggtgggcagatcacgaggtcaggagttcaagaccagcctgaccaacatagtgaaaccctgtgtctactaaaaatacaaaaaattagccgggcgtggtggcgggagcctgtaatcccagctactcaggaggctgaggcaggagaattgcctgaacccaggaggcggaggttgcagtgagccgagatcgcaccgttgcactcccaggtgacagtgtgagactccatctcaaaaaaaaagaaaaaaaaaaacttcaactttttcctctttattaaagtcctatatcttgagagcctaatgtaccccaatcactcttattgaaatgaagatttgagccataaaaatgaagccacagaaatgtatgtttcataaactaattttaatgatatatttttgaatccactaacgatatactctgttcagcagatatgattaattaggcttctgaaaggacagagtaacttagtaactaacttatttactaaagtagtagaacaatatgcatttggggctgtaagagattaccacaggatcatggaaatggatagtgtcttagttccttttatgctgttataacaataccacagcctgggtaatttataaagaacggaagtgaatatggcttatggttcttgaggctgggaagcctaagaggctgttgccagcgtctggcaagagtcatcccatggccgaagggtggatgagagaacacaagacagcaaagggggctgaactcccactgtaatggtattaacccaattgcctcccaaaggccccacctcttaataccaatagaatggcaactaaattgccaacacgtgaacttttggtggacatactcaaacaataacagatggagcgcagcttttcaacaggaaatggctaaaccaccaaaataaagattcatatactagttgtctccctcagtgaaaaaaaaaaaaaaagcttttttttttcattttcatggttaatcatattgatacactttggatttttattgttgttattattttacttttaaataccctacaacttcactgaggtcccatcttgaccactcatttctgtgtagaaagtttcttataatataaagaagaggttaaaacacactttmatgggtcccatttccagagattctggttcaataaagcagaatggagcccataaatttgcwttttttaaatggggtgtttctgtgttgcccaggctggtctcaaactcctgggctgaactgatcattccacctcatcctcctgagtagctggaattacaggtgtgccactgtgcctggccatatgaatttgcatttctaacaggcttctagaggatgcctgaacaakggcaactagtgcaaggactaccttttcagaaacaaaaccattcctttgctgtgaaactttgttatcaaatccaaggggagtcccaaaatgctatctgaaccacatgaagaattccttttatctgggctggggatagcctggagcctgggaccaaagctgaccaaagcctcctccaatcctaatttcacccccagtctcaggttgccgtgctattgtcacaaaaatgttgattcaggcaatgctagtggagaagaagccaggaactggagccagagaaccataaactctgtcagctcttagctgcccaacagaggtcttctgagaattaagtcaggcagatctcactagctgcatagaaaaagcaagttcaaaatagaaagatgagcagcagacagaaagaaagatggatattctccagcctcttggagataaaagagaggcaaaccatacctctgctcagaattgtagcagagtgaaaagtctttctgaccaactgtagacaactattttctcctcaaaaatgaagagagggaatgaggttggttatacgtgtggcaaacatctcctgtgtagctgacattttcttactcttaatggagtattttaataataagtgtgtttttctctaktttaaagcaatctattttatcaaacttttcttttatggttagagttttctaggttctgtttgagaaatccttaccaaccctaagatatagaaactattttcttatgtattatcttctagactatttatcattttgtctttcacatttagatctgaaaatccatctagaatgaattgtttgcatatcatataatgtagggagtccagagtcattgttttccatatggacatccactttacccagtaccatttgttgaaaagactgtccttttccctactgcattgcagagccacctttgccataaatcagactcccatatatttgggcagtgaatctgtctctaggttctctcttctgttccagtgttctactagttttccttacagcaataccacactatctattgctttattctttttcctcaagattggcttgaagatcaccttggttattcttgatcttctgcatttccaaataaatttgaatcagctttycaatttctgtatccctccccagaaaacctgttggaatttagggattacatttaatctacagatcaatttgggaaaaaatgacatattttatgatattaagtgttccatccatgaatatggcacatgcctcattttaagtcttctttaatgtctaccaagattagtatagtgtttttgtaccatccttcattagattttccccctaggtaattaaatgactttttaaaatttaatatttttatttccattttaagttatttgttgctagtacatagaaataaagttgatttttgtatattagccttatgctaatatacaaaaatataatatgctaatatacaaaaatataatataattatgcagaccatgctaaatttgcatattctaatagttttaaatttttcatttttatatatacaatcatatcatatgcaaataatggcaattgtatttctttctttccaaacttgtgttttatttcttttttgtgtcttattgaactgtctaaaatctctattacaatgttaactagaagtgatgataatgagcatctttgtttcagtcctgatcttgaagggaaaggtttcaacatttcccaattaagtatgatgcttgctattcattttgtatatttgttctttatcacatgaaagaagacctcttgaattcctagtttgataagagtatcatgaatgaatgttaaatattaccaaagctttttccgtatttattaatttattaagattatcaaatgattttcccctttattctattcatttcataaactacagtgcttggtttttgaaaggtaaatcaatttttcacccacaggttaaatccaaattggtcatgatatgtataatcctttttatatattgacagattcatttgctatattattagaatttttgtgtctatgttcatgagtgagatcggcctaaaatttttttttcttctaatgttgttctcaggctttggattatggtagcctcataaaatgaattggaaaatattccctttttttggtattttacagaaggcttttgttagattggtttctagtacatttcaccagtgaagccacctaggtctatggttttgtttttgtgagagttttgaattatggatttaatatctttcataaatataggactatttagactttctgttcattcttttgtcagtatggagaagttgagtttttctagaaatctgttctttctttttgagacagggtctcattctgtcacccaggctggagtgcagtggcaccatcatggctcactgcagccttgacttccccaggctcaggggatcctcccaccttagcctcttgagtaggtaggactacagacatgcactatcatgtcccactgaaatctgttcattttatataacatttccaaattgttttcataaagttattcttaatatcctcttttagtatcttaaactttatagaatatttagagattcatttatttttatttgcaatattattcgtgcctttcctctttttcttcattagttttaccagggattatcaattttattagtcttttcaaaaaaccaaccccttagctataatatgcttattttatattttattactttctactctttatcttttcttctttctactttttagtagaccttaaaaggtctaaatttttctttttttttttaccattttgacacagatagatcactgatttcaaccttgcaaatgttttagaatgtcacaattttgttataatttaatataaaatattattttttgccatggtgatttttcaacccaggaaatatattattagtgtgtcatttaatttctatacatggggattttctagttatatttttattatttatttgattatttatttatttatttatttatttatttttattatttatgccgagcttatttctactacagccattgatgattatatgatttcaatcatttcaaacttgctgaggcttcctttatggctcagaatatattcaacttttatgacaacttctctgtgtgtttttaaagactttatcctcaactggatggttgcagcrttataaataaatgttggtttgttaattgtgttgaaatattctgtactctgagttttttgctacttattctatcagttgctcagaaagatatattaaaatttgctactataattgtggatttgtgactttctccttttagttctgttcaagttcagctttaaatactttgagctagcttactagatcatgcaaattaaaagttattgtttcttcctggataattaaaccttttatcataatgacatggcactctttagctctaggtaatacttttctccctacagtctactgctgtgtttgatatttgtatagttttacgagctttctgttgtttagtgtcttcatggtatgttttctcatccttttacctttagctttttcacatctttaaagtgtactctgtatcaaacacctctgaggccccacctcataacctctgagtccaccttttacttagcygtttttgctgtgactagctttgtgccggtgtggcacacatgcacaggagaacccagcctaagacactcttatgaacagcaagtacttgagttttgtttttgtttttatccagttcatatttttttaattaaaatatttattctgttcaaatctaatgtaattacttatatacttaggtttaaatccagtattttacaatttaccttctatttgttccacttgttttgtgtttctttcctcctttcttactttttttgaattaagcaatttttatttttaaatctcccccccmccatgctagttgattgtatcttatgtgacaactttttttgtgattattctagagcaggggtcagcaaactatggcccatgtgccaagtcctactggctgcctgtccttgtaaataagttttattggaacacagccatgcccattattttgcttattgtctgtgctacttgcacgctacaagaccatatggccggcaaagcctgaaatatttgccatctggtcctttacagaaagagtttacccactcctcttctagaaattatggcatattatcattaactaacttattaatgtctcatagaaatcagtacttttacagtggtaaaggtacaattcctgaacaagtaaaagattttagaacagttgaacttcatttactgcctcatgatttatgtactrtctttatttgtaaataccacaagatacttttactattcttttatatggttaatatttatttaggtttacctacatatttaccattttcattgcccttcgttcattcttctgggccaactttctatcctggatcatttttcttctacctaaagaatactctttgatgttttaattactatagaatttctgatgacaaattctctcagtttttgtttgtttggaaatgctgtatttagtcttcagttttgaaagatttttttgctggatataaaaatgtaggttggcagttattatatatcaacactttaaaaaaatagtgtcattgttttctgactttcattgtttcttttgaaaatttagctgtcagtctaattgttgcttctctgaaagtaatctctcatttcttttttggctgctttaaagatattttttggtctgtctaggttttcagttttactatgatgtgcttagatctgagttttctgcttattattgttggtttttgtattgcttcttggatctgggacttgatggcttttgtcagtttggaaaattcttaggtattatattttcaaatattgcttcttcattttctctccktttctagagccttctaaccatgtctcaggtgtctcttttgctcctttccatattttttctacctttttcttcttttgcttcattctggattattttcttctgacctgtcctttttgttctcttttcatttgtctctgttaaacacattcaatcaccttaacacaataagagtttgagagtatcctaaatgaaatttagttatctaagggtggttcacacatactctgatggtataccattttggagtccaacaaaagcctgggggtggggtttggtgtggttactttctagagcctcttcccctgggtgggccccatatatcactttttgtcccctaaccctgtgatctgttgaaagctctgtccagaaattacctccatgttaaatgatagcaaagtccagttgtctgtcttttttcctttttttagaaagtttttgtttcaactgtgattttctcttttctttagtactttactttctgttttctgacagtttagcttatctgaattatggagtctagaccttctaacacttcttcataaagaatagggcagtcaaaagtactgacagttaagaacaaggagcattaaaatgagctmactttgcagtctgacacaatgaatatgtctttgcttatacaaaggcagtcacaggttcttttaacagaacagtcattcaagtaaaggctttaaaaatggacagaggaagattgagttgtctgtgtaatgaaagaagaaaaaaagactgaatttgttgattccgcaggagaaacaatatcaataatttgaaagtttacttccatgtagacaaaagtgatgcctcagttttttgggtttttttttttttttgtaacttatttattcactcattcaatcagcacatattttttgagaacatacgctaaggaaaaggatgcaaaggatcttatgaccactgttttgtttgctgatacttctcaacatttcacagtgaatttcttaaaaactttctggggtcttcacatcttttaaaatagaatgatgtctgctactaaagttttgggaaaacataaacaatttaagtatattttccctttaaaatggagcactattggagaacatcaggccataatgtatgcaggggttacaaggaatcccatgagcatccttatggctggggtggagcagtcagctgattacgcctacctgctgtggtgatcttggctattttgtattttaatcttttttactcccagtcatatgttatttatctatttatccaggcttaaaaacagtggaaatttacttctcacagttctggaggctarraagtgcaagatcaaggcactggcatatttggtgtctagtgagggcctgcttcctggttcatagcggtcttttctctgtgcactcacatggtgaaagggacagggaatctctggtttctatcttatgagrgcaccaatctcattcatgcttttyatttatttgtgtattcattgtatgttttttggtttgaggttaccatgaggcttgcacatactatcttataacccttttttttttttttttgagatggagtctcactctgttgccaggctggagtgcagtggcgcgatctcatctcactgcaacctccgcctcccgggttcaagtgattctcctgcctcagcctcccgaatagctgggactacaggcatgcgccaccacgcccagctactttttgtatttttagtggagacagggtttcaccatgttggtcaggatggtctcgatctcttaacctcatgatctgcccacctcagcctcccaaagtgctaggattacaggcatgagccactgtacctggccataacccatattttaatctgataacaacactgtttgcataaacaagcaagcaaaaagacaactaataaaaactctatgccttaacttcatcccctcatttttaaacttttttgttgtttttatttatatcttatgtcttgtaaagttatcatcgttattatttttgactggtgcatcatttagtctttctacttaggataaaagtagcttacacactacagctacagtattataatattctgtggttttttttgtgtgtgtgtacttactattgccagtgagttttctaccttcatatgatttcttattgckcattaactaacttttctttctggttgaagtactccctttagcatttcttgtaggacaggtctggtgttgatgaaatctctcagcttttgtttgtctgggaaagtctttatttctccttcatgtttgaaggatatttttgctggatatgctattccagggtaatggtatttttttccttcagcattttaaatatgtcatgctactctctcctggcctgtaaggtttccactgaactagtcatatggcattaatttataccaaggaaagacagcaaattaatcacagttataacattaaatagcttagcagattcatttcaaggtcatctttttcaggcctgaagttgcatttattgatcaaaaatcttatgtattccactcaatttttctgtaaacctaaaactgcttggaaaaagtctaactaaaaacatacataaacaaaatgcaattttattcaaagtattaaaaaaccacataaatttcaagctgtcgctagtgtttcaaaagccaatacctgtagtaaaagacaaaatatagtgatgattgtaattgttktagtaatcccacataggtagaaggctatccatggccttactgtgtcaagcaaagagaagcacttacattaacagactaaaataaacacaaaatgtattaaagtaaaacatttcagtgcaaaatgcaaaaatttaaaaatgcaagtttttatctgcattcaatgctgagttagaagttttttcttatattttaatatgcgttatctccaaaccaagcacaatatatcattttatttgtcaaaaaaatttcttatgtaatttatttaaagtaaattttaaattatatcttttattatagtggctgaagctggatgttactggtaattatgttaactatgaattttataacataatatttgataaaaataaaagctttaacttcaggtaatctctttatcatatatcatacaaatactacaagtgattctctaattttttaaggtttctcaaaaatgatttgcatgttgtttaaaaattgggaaatactaacttctgagttgggagtttattccttactttgcagcggggaaaactgaggttcaaagggattgaacaatttgcacaaggacaaacaacgaatagaaggcagattctagattcaaactcagtattgtctgattctacaatccatgctcctaatcacctttcctagcatacgcctgtgcttacacagtggcaatgagaattgaagacgagacatctgaacaatgttttctttttmttttttttttttttttgagacagagtcttgctcttgtcacccaggctggagtgcaatggcacgatctcagctcactgcaacctccgcttcccgggttcaagtgattctcctgtctctgtgtcctgagtagctgggactacaggcacacgccaycgcacccggctattttttttatttttagtagagacggggttttgccattttggccagactggtctcgaactcctgacctcatgatctgcctgcctcagcttcccaaagtgctgggattacaggcatgagccaatgcacctggccatttgaacaatgttttaaagacaaaatcaataggcaacagtgataacttggatagatagaagtttagatgggtaagggttagaatagatactaagtcttctagctaagagatttaggaaaggagtgttgctacaataaaaataaataagttgagattttatttaggtgggaagttgctgagattaatttttggtcttgctgagtcacaggtaacattcagatgtaaatagagctgtcacatagacatttgaaaacatagaactgggtactattgaaagtcagtgctgacagtgtrgatttgaactttatcagcaaaaggtagtggttgaaaccaaaacagtggaagggcactgaaagagtgagaacctggagagggaagagtatgatctaagccttggaaaacacccccacttcagggatctgaggaggaacaaatgtgagcagaggacaaaacaacaaaataaaaaataagaagttaaaggagaaccaggaccacatagaatcatgaaaactaagagatagtaaatgtggctaaaatgtattgagcacctgccatgaaacatacatgctatgtattttatattatttaatcttcataataactcaaggaggtargttcctgtatctctattgacagataaggacatagaggtttagcaagattaaattatgtgcctgttgttcagctagtaagtcctggggcaaaaaaactggaatccatgtcttccagcctcccaagtccattttttaactagtggtctccagagtgcacaaagcaaaccactgtgatatgggaaaaaaatcattaaaattacaataatagaatcccatcctttaaaaattgtattttcatatatatattttacaatgtgcattctgcactagtatagtaatacatgcatatcatatgtacatgcataatttgtaaattaataagtaattgcggcatatgcttaaaacatttactaatgtgaagaggcagtaaaacactttggagattattgcttcaaaccactatgcaaactgtctttttgcctcgtcccattctcagttgtaagctgcattcacttcatatagtcgtgctatgttttaaatgcaatgctagttctaatttagttaaatagaaactttttacttcataggttcttttcatcctacttcttagtattttctgaaatttatgaagacctttgggccttttagtgctttgtgatagtgaaaggaacagaggccttagaccagacagacttgagttcaaacattaacttttactttactgaccatgtgatctcagacaagtacttaatttctcagagcctcagctcatctatgaaatggagataacatttaccttgcagattgttgtaaaatttagcaatatctttttttttttttttttttgagatggagtcttgctctgtcacccaggctggagtgcaatggcacaatctcagctcactgcaacctccacctcccaggttcaagcaattctcttgccttagactcctgagtagctgggattacaggtgcgtgccaccacctgtagagacggtttcaccatgttggtcaggctggtattgaacttctgacctcatgattctcccgcctcagcctcccaaagtgctgaaattacaggtgtgagccaccacgcccagccagcaatatcttaaggaaacagcattgggcctggcatacagtagataatttttaaatggcaccaaatagtaataataacaatagtacttgtttgctgtagagaacatctgtggcccagtagttcctcccatctaaaatcaagttgcatatataatatttttagcaaagtttggctgagactgttcttaattcaacttggaaacttatttgagcatatataaaaagtgttggctactgcatatggccacatgagttagagaatgctatttacatggactacagtgggaatggctgctcctggccttgggtagagcagcagccctggaaatacactgtcaaaaacatagagggccaaatatatggcagcctcyacagaacaaaaggaaatgaatgcagctgcccacacatgcattagttggtatgttgaatgcctctctatttgttgatgctctccacagatctgtacccccgatttggtggtattcctggcttgtgctaatcagagactcaaagaaagattactgaagcgtgcagaacagcagggccgaccagacgacaatgtaaaagctacccaaaggagactaatgaacttcaagcagaatgctgctccattggttaaatacttccaggaaaaggggctcatcatgacagtaagttagctcgacttttacaagtccaatacaagagcgctctttcagatttctcattagcccatgttctcatgtagaaatcctctttaccttaaaaagtggcttttggggggtacagaaccaatggaaaaaaatgtatcattttgacctgatttgcctttttaagccatcatgtttttttaaaaaaactttctttttaatttaattgatttttatgaaagaagataaattttaaccttggccaaaattctgtagtcstcaagtaaaaaagtgttttaaagtaactgtctgggtgattgtaagcaatatttgtccagtctctccactcttttgtctgtctttggaagcctaacaaaattgatagacttataaccacacagttgatgtggggttataatagatttaagcgttgtttgtcatgatctactacataaagaaatgaggttctgacttcacagaaaaagtttcctaagggtttgacttgtcataaagaagtgataatgtatcaaaatgggaggtagtcacccttctgctcctttgatacaatgcaaatattaatgttttcctaaatttttagtttgttttatggctaatgatattcaatgtgccaatgaaagatgacactgaatcattagtttgtacagtttttagaatctagaacattagaggtgaaggttcagctaaatttatgataatcacarcatcagattccagcattaaagcgtagaggagacaaagaggataatgggtcatctgaagaaagcactttatgcaagaggacactaaaaccacagcagctgcttgacagctagatggtggcagaccttggcagaatcctcctctcagccctcgggcccgggccagtggaccaaagagttttgtgtagttgggttacaagcctctgtagagaatctaatcaaagcgatgcatgcccatcccaataaaaagcacataaagactttttttcacaaattttaggtaaatcagctgaagcccatccagagagctcctgtgatcttgacaattcctgggttaaaactctcttcattagactaggatgcccttagacctgaaagagacagacatgacatttgaagaataatttctttgcaatctttttagcaccataaagaaatatttaacgtgatttgctctttgagtcaaagttgtcatgtcgcagagttgtaagtctgatctggaaattgttcacaatgccagggttcatattttgatctaaagcaggcattgagtaattgaaaagatttgggaaaatcagggtggatgcttctgtggctatgttttgttggggttattgtttggtttttgttttgttttggtttggttttttgagttggagtcttgctctgtcacctgggctggagtgcaatggcgtgatctcagcttactgcaacctccatctcctgggttcaagcgattctcctacctcagcctcccaagtagctgggattacaggtgcacaccaccacgcccagctaaatttttgtatttttagtagagatggggtttcaccatgttggccaggctggtcttgaactcctgacctcatgatctgcccacctcggcctcccaaagtgctaggattacaggctgttgtttgtttttctcaccagttaccaacactaacttccacattgtatcataaaaaaagaaatttgccctacaaaccaaaccccaactgtaaggtgcagggccagatttaattgatgtttgtaaggctcaaaggtgttaccagagtgtctctgattactccctgcttgtcacattcgtcatcacaagcagagcagatttctcaaatgaatgcggagtggatattattaatttactaatattttgcatggaggtgaaatgccattgcctctaattgagggagtcaataacaatgtggatgacagcctgtaacctcactgctaaaaccaaatgagctttaagataaatgcttctaattactgacagaaaacttgcctagtaaagtcgccttttggaaagcaatgaacgcaaacacaggctaagctctggggaatataatttgaaaaaatttgacaaagaagcaaaacatgtgtcctcttttagaacctggatcatagtttattgctggaattaaaatatatttggtgacacttctgcttttaaagatgagttaaataataaaaatgatcatttgtattaataataagcatgttaagattttaataaaaatctgggggttaatagatcaaacccaaatatttccttttctctgtagttttttttttttccttttctcccacctgcccctcctgattcattcatttactcattcagtaaatatttactgaaaaccaggatactctgctaggggacaggggtgcagagctaaataaacaaagggtaaggatctttattttggcacwgacatattgcagacacctagaacagtaccttctcactatatagtaagctccaggaaatgaacagagcttgcagtgtgtggagaaagagacattaaacaatcagttattaagtgtgatgactgttgagttatgtgttataattgtgatggattattaagtgtgaaaatgtgcagggtgtcctcacatatgtcatgcactgttttagggattgggattccctgtggtgaataaaatagactgtctccacactccaatagcattaatcacttatctctgcacaaagttcttaagggccacagagaccatgtccctgtttagtccagttgagaaacttcatgttagtacccctcttctctggcgctttggtgtctgaatcctgtcacttggaatctcagttccgttgccatttaataatttcatgatgccctacaaggtatagcctctaggacttgatctctctatctctaaattggagacagtgttacctacctcataatattgttgtgtgggtgaaatgagagaatatgtataacatggtagatgatrgtaatgcagagagcgtgttttaagatgctccatgcagccgctttgcctgattcagattccagctgcaccacctaccacctgtgtgacttyctgcaggttacttatctgctctgcaactcgtatgccttacctgtaaaataggtataataatcaatcctacctcagtgtgattatgaggagtaaatggatgtcaagagcttaaaacggtgtctagaatattgtaagggtaaatgacatgattgatattattgtacagtttttatatttctttgtctttcttccttccccagcaaatgctcatcttttagaatctacagtaaccactagcaattctgtgccctttgagggaactctgttgccttttctccaatacataggttattgaagaaatccaaaatgaataggttgtaaaaactttagacataattcatctttttctttaaaagtgtctattaatgagttgtaagtttgactcagtgtcttctttagattctatattgtccgtgtaatcaagctacatagtggctgtgtctgaatagtaacagacatcattccactcttttcttttttacctcattgactatatctgttggcatatttgactagagaacaaacccagtttgactgaaaagaaagcctaatcagattagccaagaaaaacatgctgttgcttgaatactgtatcttactgacatagtttccattacatggacttcttcatttttgttcttgtattatacatgtccatatgcagtcatgtgtgcaaatatgaatgaaaataatatgaaatcataaggctagtatattagaaacttcttcatagaactttctcagacatatttatatgttgtctttaacttaccctgaagttggatgtaatttctcaatacatcttttactgctttatgcttgtgattaaagattaggatgctgtgagttcccaatgtttggcagaagatttttcttgtagttagtttagatattgctggatctaggaaagctacttttactattgctgagtaagctgtgtctcttgacattttggagcacttggacttgaaactgtataactcttgaataataatttcccttttatagatttttacagttccaataaaatgtctgtttcatgataatttttaatctttcttgtaaaagtttttttcaactagtcttcatttcaatcagtctcaccaagttggaacactttttttcttttttttaatttatatttattgtacatgaataagttctttagcggtgatttctgagattttagtgtgcccatcacctgagcagtatttactgtacccaatgtgtagtctttgatccctcatccccctcaggaacccttttctaagaaacagaattaattaagacaagtcaagtttttgtaagttttatgaactttttaaaaaatatatgcaattttgtttatttttaaagaaaaaggtcttcttaaattgtgcaaaaaaaaaaaagctcagatgcaatgtatatgttattttttccagaatgcattcaaaactttgtgccattagatgttctattcagccagaaaaacatggatttcaccagggaaatggatatacacttgtgtgcattgaaaaaatgctactgaatattggtaataatcattaaaatccacatttagctttagactgtgaagtaaacaaatagtcattttccttctggactttttgtaggagtataacttgaaatcagaggtaagctgtggtcacaggatgtatgaaaaggcctactaattcatacgcaggtttaccaactaaatctcttcagccaggaaaggcagaggctgaaaaaaggttaaaatcaggattatttattgttcaccaataccaggtttcctgggaagtggtcaaggaatgtgggaagggctrcactgctatttagcaaggctgtatagaccaatgtttccctaattttagtacttactagaccagaaaaaatattttttaagtaggggtgagatgacttyttaattttacgaagtgaaggcattagaaaaaaactcccaatacttgccttatttttctaattttgctgtggattgggaaacactcatcacaaaccagcatcagtgctgggaaacgattgacatagagagcacaggcctgtcaaactacaccattgtttattaccagacattgtccccaagtcccagataaccccattcacactacgattgcttcatttgccccatatcacttccttcaaatttgagaatccccgcattatgcatttcaaatttaccactgaaactatgcacagttgacccttgaataacgcaaggattggggtgccagctcccatgcaactgaaaatccatgtataactttgagtccccccaaacagaactactactaatagcctactgtcaaccagagccttatcaataacataaacakctgattaacacatattttgtatgttatatgtattayatactgattcttaccataaagtaagatagagaaaagaaaatattattaagaaagtcacaaggaaaagaaaatatatttattgttcgttaagtggaaatgcatcatcataaagttcttcattcttgttatcttcacactgagtagactgaggaggaggaggaagaagaggggttggtgcttctgtctcagagtggcagaggtggaccaaagtggaccatgcccttcaaacccctgtcgtgaaggatccactgtaattcccatcccatcagacactcctagccacaggaaaaataagtaggaatagtaaaagttaatttagagagaactgctgaataattatttgttaactgacttcacatttcataggaaccaacactaacatttaaagtataataatacatttatccctaaactctcaacgtacagccattggttaattatcaccaactccacttagcatcactgcacatatggtggaaatggaaagaaaaataacccaaaggagaaaagaatttttttgtgggggataggrtctggctgtgttgcccaggctgaagtgcagtggcgtgacctcagctcactgcaacctctgcctcccaggttcaagccatcctcccacctttgcctcccaagtagctggaactacaggtgtatgccaccatgcccacctaatttttcgtatgttttgtagagacagggtctcactttgtccctcaggctggtctcggactcctgagctaaagcaatccacccacctcagcctcccaaagtgctgggactacaggatgagccaccacacccagccaggagaaaagaaaactaaacagcatgaacacttatcagcaacccacctaaacataagaaaagcaaacaaacatttgataacaacttgcccmaamaaacccattctcctaaaattactaggaaaaaaattctgttacagcgtctcaataggtaaggggttgatgagtttgtaatgtgttacataatgaagctgtatttcctttgagtaccatcacttatatcctgtttgagcatccattgtcatgtaaccaaaagctcccactaattcctatttctggatttagtgactaagaaaatagtcgaggaagagtttttaaaggttaataggaaaggccatggaagtattctggaagatatttacttaggtaacaatgatatctatattcacatggatatatggtcccctaaattgcttttcagttgccagagtgtgtttaaattaagtaaacagtgccttctggcacaaaacctgatgctgatagaacctcagtgagagccctgaagcaacatgagaaataccgtatccatttttgactggaataaagagcagcttaaaaggaatcacatcctctgggcaacaagcacttatcaaatcttaactgtgtgtagagctgccaagatggtgccgttctcagaaaagtcctgttgcttccctaaggagcttgccatctctggggattactcagtgttgcccacttaatttacctatttacatacctatctgtaattttggttttaaaatatccagaactaaattgaaaagtgaatctgattactttcatatactgtcattattgtgggctctaaaacctaaaataccgtgatcacaatttctctttcaatcttttggatagaaaggaaaataaaagcacaaagataaagccatttgctcacaaaatggcaacccgcatatagcaaagtatatcatccactgtcctgggcagcaaattctgctagttcctgaacagcatcaaaacaacaggaagaacaagcagataccacatttatagctcatcctggcaatctgtctctgtcataagcaacgccctgactcacaacttttccatccccaaagctccctcacttccagtcgtcttcacaccccgtagacagaaagcaaaccaaatgactcagcaaatgcatctctctcgaggttggaaactgctgctgattatatggcagtcctactgtcagcatcggatgagaagagctcttgcaccaaaaatgcaatattttattgtgatgttttatacaggtattaacaggaaaaataaggaagaactttaaaaatgaacaacttcctcccccaacagaatgtaaaatatttttctgttgattttattattaccgacactcataaaacagagtctgaagagccccatgaacaattttttaatcatctgaagtagaaagcaaggctctcacatgataactataaaacaaataatgtggacaaaatcgagataattcaagtgaagacctttggaggttcacattaagaaaattctgtgtgttctcattgttcaattcccacctatgagtgagttttgtccttgcgatagtttgctgagaatgatggtttccagcttcatccgtgtccctacaaaggacatgaactcatcattttttatggctgcatagtaacatggcacatgtatacatatgtaacaaacctgcatgttgtgcacatgtaccctaaaacttaaagtataataaaaaaaaaattctgattccaagaactgttactgayaggtctatctacaaatactctagttaaggtctgtgctatttctatgggactgtcttcaacaatagcttgtctttttaatttttttaaagcaaaagaaaacaaattactaaatagttggtagctgaatgtcatgtcatactaacaacttcctataaactgctgtttcaaccctgcaggttctatatgtatacacacccacacacccacacacccacacacacacacaaacacatatttttagctggttattctccaggagacactctgtgatcagaacaataatgttgacaataatgtcaacaaatattccagacttcagakttaggtcttcatttgaaatgttttactaagacttactgagaacatgtgtaagaaaataatacttttggtaatgtccctagactaaatttttttcatgtttaaggccaaactaattggaattaatcaatatcttttaaagagacctggcactatagttaaattaaatgtcccccctccaaaaaaaagaagacaaaataaaagaaaamgaataagcatttaaggcttgcccgtcaggaaaatacaacaaaatattatgaatagatggtgccttaggaaacaatagctaacaattcctgaatgcttaatacgtgcctagtactattcggaatgtttctgttctcacttataagtgggagctaaacattgagtacaattacctatataacaaacttgcacatgtacctctgaacctaaaataaacattaaaaaaaactaaaaaacaaacagaaaatgtttcacatacgataactcattatttctcacctaatcttgttggggcagatactattattatctccattttgtaaatgagaaaaacgaaagcacatgaaagtgtagcctaccaggatcccacaagagcagtggagtctcaacccagatcacactgctggccccaaaggctgttttgtgatcattctgttgttcattcatcaaaatgctttctccaggcacttgtcatttgacaggcatctctatgcagctgtamtctcttcatttctgttttttagaaaagaataaatgggaaaattaattatattggtacattacattgagaagttttaaaagtaatttttgctaggtaatagatgtaaaataattaagataaatcataaaattgattaagcacacattagaagtgaagaaattatactacaaatggccaattgttggaccttgtatttttgtttatctatactactatctctttcttacctatctccttcttgctcagtcctacaaatcgaacrtaaaactgaggcttcagttctgggacaggcaaagcactgtccttgtytcccttaagtcttacgttccatttccccattatgatagtccttttatagtcattcattcaaaccattttattgagggcctatgtattcatggcacccttttcatcagacaacagtgatcctccttttactcaacagctatctgttgacatgcctgatcatgacattttcccatatccagggtaccacagcaggcactgcaaggaatacaaagatgatgtggagccagatcctgtcttcagggagtttgtgacgcaggcacagagatgatagaaagataaataacttgaactcagctggagaagtggtatgagccaccacactgaagtaatagaacaggccaggaagaataaagggcagggagtgacttcttcctggaaagattagggaaggctttcctggaaacattgacccttgagaggcaggaaggagttggaacccagaaataggaaagaaggtcatgataagcagacacgtgtagaacagagtagtgagaagtagaaaccaggggacagaggtgctgtcatcaaactgagcaaggcactgaagtgctaggctaaggaggaagggtttttctgttggcaagggccacattgaaaggcttggagcatgggagtgacacagctagaaatattaagctggtagctgtgtgtgaaacagtgaatggaggaagcatctggaagaggcgtgacaagggcctggactggaatagtgactgacacaaggttttacttctccatatggcagatcggcaaccatctggcacggatggcaaacatgggagtaattggaaaagttctctragggaaaatagcactcaaaaatcacctgcatcataggcgtaacatacattttcccagtttaaccattttggtttaccctttggatagtgttcatggcaaggctgaaaggaaaggagatagggaaggaaagggaatgtaatcaggactctgacaagctaaagcattatcaagtgacattaaaatccaagcaaagggagagtagagtcagttgaatcacaaatttttctttccactaataactgtttcaaaatagttcattaagtaagttaatgaattaattcaatcgttatacatggaaccatttattttcatggcagacagccctgcacatcttgcagcagtgaggacataattccattaaagcactgtgcaataattggtcttcaccaaaaataaaaggtttgtttcattacaataaaagaataactgggccgggcgyggtggctcatgtctgtaatcccaacactttgggaggctgaaatgggtggattgcttgaggccaggarttgaagaccagcctgggcaacatggcgaaaccccatctctaccaaaaatacaaaaaattagttgggcatggtggtgcacacctgcagtcccggctacttgggaagctgaggtgggaggatcacttgagcccaggagatggaggttgcaatgagccatgattgcagcactgcactccagcctgggcaacagagcaagaccctgtctctaaataaataaataaatatatgaatagctatggcttaaattaacaggtttatttgatgtgtgtaaaaatatgttcagagatggacgatctaggagtagtacaatgactacatggtgtcatcaaggacccaggccccttctgtctttctgttccaacatctttaatgctttctcatagtgacaaaatcatccagtctaccttccacacagaaaaaaggtgagatagtaaagggctgggaagccacagctattgcctttctttaggaaagcaaaagctttcccataaaccccctctccctccctcattgactggcacctgtatctcattggtcagaagtggagcatgtgtttcccctaccttcaggggaggctgcaaaacrgagtttttagctttacaacctctgatgtagaagaagacaaaggagaaaggagctggaataaatgagtgagccaacctacaataaccaccaaaaggttaaaaataatccttttttctgtttgaaaagatacgtaaaatacatctgcaagtaattctttttttttttttttttcttgagatggagtttcsctcttgttgcccaggctggagtgcagtggtgcaatctcggctcactgcaacctctgccttccggtttcaagcaattctcctgcctcagcctcccaagtagctggcattacaggtgcctgccaccatgcccggctaatttttgtatttttagtagagactgggtttcaccatgttggccagggtggtctcgaactcctgaccttgtgatccgcccaccttggcctcccaaagtgctggaattaaaggtgtgagccaccatgcccggcccatttgcaagtagttctatgaaaaatggttaaaatagaaaatgtgcttaataatattarctacttttcagtaagcactttcaatataccagactccttattcatcttatatctaattcttccaacagtgttttaaaattaatgaaagaaacagaggcccagagaaggtcaggaacatgccataaagcctgaagccagtaaacaagggagctgaggtttgaaatagattctatgttagaggatccctcagttaatgacagggaattcaaccagaacttatgtccaagtagagttaaacacccctctcaaaacagccagaaaatatattgataatgcctgttaatgtgaacctgcaggtttttgctgtttgagaagcaatgatacctgttaaaaggtgaactgaggcacaataaaatttgaaagagtttatttgcacaaacagcgactgataaattgaacaactccaagctggaagtggttcaggagatccaaccagggaacaccaggggaaggcttttctagggcaaacacagaaggaagtraagaaaagaaaacatttgattggttactgttatacagttgccttatttgatctatcttgctggaaagtccttagttaaataagttatttggcagcttctgataggttagtcttaagtttcattttttctttaatacaggcatttacaagaagtagcacaagtttggtttatgtttgcaaattgagcaaagttaaggtcacttatgagacctaattggctttatcttctcagagattcttcaagtctggtctccattttaatttacctttacatacttaattatttttttaaaaaaaataagaaatttgtttctaagagatgtgaagaactaacatactgtatccagtgcagcgccaactgatttacacatttttaactattttaatcactcacctctgtcatgtaggtattaaaattatttagtgccagccaggcatggtggctcaagcctgtaatctcagcactttgggaggccaaggtgggcggattgcctgaggtcaggagttcaagaccagcctagccaacatggtaaaatcctgtctctactaaaaatacaaaaatwaggcaggcatggtgttccatgcctgtaatcccagctactcaggaggctgaggcaggagaatcgcttgaacccaggaggcggatgttgcagtgagccaaaatcgtgccactgtactccagccagggcggtaragcaagactccatctcaaaaaaagaaaaaaaattatttagtgccttgtgtgtgccaggtgtttctatttagattatctcatttcaggtaaagatagggacttgctaccttttctcagataaactctaaactgcgcagtcttactcttgccttacccactctgcgtctcactctgacattactccttgatcccagtctgccctgtttcacccttcagactcaactgctgttgtcttcctcaatataatgggcttcccttgtctgtgtttttgcctcccactcagctggcctctggagggcccttccccaggcacaactgcaggatgcttccagctagtttaacccaacctggcaggtgggacacaggcaggtacacagacacgccactgctctgagggagcccatagagaaaagggaggaaaggagatcagtgagtggcctcattgcatctgaccattgtaatgataggaggaaggatgtacaaaaggctgcaggagggagtaaattgcacctgcctttccatgataactctggtgggactggatgaacttgacactctggaacagagattattccatgcattcaagaagaaatgagrcatctgaaatttctaagtggagttacagccattaccaagttcaggattggaaatgggagtaagtggtgggaaagacagaatcaagagataagcagccagggaaggagtagggaataaaataaattttatctaaaccattctaatttcttgttgctctctccctgctcaacaaccccactgaggaatttaatttagctyagtataaaataatctacaaatatattcattcatcaatttctttttaggcaattattctgagatttctagctaatgggggggtactgaaagatgtatgaaaatgttgatttttggctttaagagctcctatatgaagtaagaaagccaactctgaatttaaagggatgtctgtggaarggaagcttgaatgtgtgtaagttgtaatgtgatgcaggctattcttttcagtagtccacttagtagggactgtgcagccagcgcagtgccagactgtagtgggtgctttgaattatttgttaacttaatgcatacattaatgaattgtactacatccgttcatcctaataagctgagagtgaacaagaacctctttagacttcattcactaggattgaataaacagcttttcagtaatgcttcaaatttgagctttcaaaaattcatgctttccactgtggcctagtctctaaccattgccaattcacaggttatttgaaggtgtcagcaaccatgagagatttctcagaaaataccacagagtgttgcttcaaagaatttccacaattgctgtcaagttcaggatcaaggaggaaaaatagaagtaatagatttttttgtaaagaaaaaatcttgtatcttacctgaaagtttaatttcaaaagataaatagtgctgtgtattataagatatgatttttcctctattctgaaayttatgcttaaaaatctgaatacagacatcacratcacttgatatatacttgataatgtttattttttcgtttttttaccaaagctttatttagagttcatatgttcatgacaaatgaattctagcagaagcccaaaaagatgatatggtctcatacaactgaatgattaatgcagcagtaatttccaactaaattctgtctgtctcagaagattttgtaaagccttaggtgaaatccttttggctcagtgagcagttgctgcatgactgcagcgtacttgtgattgctggctcatttcatcggttcaatctgaattcttaaaacaatgaaatctgatattaaaaatatcaagtagtgcattttctaaaatcccatggataggtaattccacagttgtactgctccacttcatattctgtgaaatgatagccctactttaaaattgtaagagaagagacaaaacataggaaacttcmgttatctcaaattttcctctgttacttgtagttgttcaaaatggcattctctgcagctaaggacttttccctctccctgcagtcctgatcaacctcatcaccctgtcttgacctggattcttctgggaagccaccctgatggggacagatgcccccactctgaggtcccataacaccccattttgagtccattcatggcaattatgttattttataattctacttctttatgattctaccatctttctactataactctgtctttataattccactgtctgctctcctttttataattctgctgtcatcatcaatattttatttccagcagctggcttggagcccataaattcaccttcaatatatatttactaaatgaatagacattactggactgtgaattttttgatgaccctcattaaatacacacacacacacacacacacacacacacacacatatatatatacacacacttaatatatatagttaatatatatgggggaagaaagagcaaaaacaaagcctgaaaaaatgtttccacttgaaaaccatttttcaaatcttctctgcagttgatcataggtaacacctttcaagatctctagtctttaaattgctgtaaacatgctttgttttcattttaagacttagatctcttggttaaactgcacatcaaattttgacattttttgcttctacactcgcataaagtaaattgaaattcttcaaataatgcaaatttcagaaataatgtgtaatgtcactgaaacaaaagctctataagagaaagtattttgactgaattctttactattgtatctcaatctcctagaacacttggtacatagtaagtgctaaataaatatttgttgagcgaaacatagatttaaaccaacaccctaatcacaacctggatttggaaacataaagagaagaatmtagaaaaaatgaacaggaccagacaagtgaaagcaactcttgtctatcaaaggacaaaaacagggctggtgattaaaaactcagaagtcaggggcaaacagatcacagttctaggccattcacgagttcttgaccttttgcacaagtttttgaaactcttagggcctcagttctaccatctgaaaactgaatctcataatgcctgcctcctaagtgggctgtgaggactgagtgagaaaaggtaattaaagaactaagcacagtgcccagcacagaaaaagcactaacaagacacagatattcttattattttgatgagattggccttggtactgtccagaagaattattagtgctatggtagccatatgtgctatgtactttcacatactgattctttcaatgtattggatttctgacaagagagaaattcccataatccagtgrtatttttaaaatctcaggaaagtggctcccacagctcctatgaaatgatgagctgagaaaagtgaacacagcttaacagtcagaagaagtgttgccaagcctgtcaccaactataaaagcccttcagaagctatttgataagctcttgtgttgattttttctctcttcttctgtcttcttccgatttggcttccactgtctattgatttttttcccttctstctctttgagcatggtctcagtagacaccaaggacattgggtaggactgccaatttcatattttgttcatgcctatgttattcacaaaccttctcaatttttattatattcaaataaaccttatgctggtgaaatgttgcaaggaactcaatgataaatattacattaagcaaaatgtagtttggtatggtgakccaagggctgactttgaagtcacaaagacaagggtttgaattctggcaagtctcttaatctctctaagatgaaatgtcctcatctgtaaaatgrgaatgaaggtaagtgacttgcaagattaattaaggattatagataatatatataaavctctcatatcacatgagtgttgaaataaattatatctgtggttattagtgtaatctataatagcatatactccaaaacataaatgatctaatcaaaatatgtgctaaataatgacaaataataccttacattcattgagcacttcactgagctggacaacatcatgcaaatatgttttaggaagatgataggtacctggtgatcaattctcttctactgcatgctcagttatatctaaggtatatctattcaaagtgatggattccatgagaaacctgaaatccagttctgagagctactcattacttttcaaaatgactaaatcagaagacaacaccaacagctacttattttaatgaagacatttttcagaagaaatgtcaaccacaaatctgtcttggcagttgcacgccatgttattttctatcattttacttttcaacattggcaagcgggagctgcctgaaggatgagcagctttcaagtttctatcaagagaaggaaaatggagtctgtttacttctgtttttagttctttctatctaaaaatcttacagttcctttttaaaacatgtaatatttatggagagtagtgtgtgtgtgtgtgtgtgtgtgtgtgwgtgtgtgwkwgwgwgagagagagagagagagagagacagagagatcaagcgtgtgctcatctatgggtgggtgctgctgagggtcaagaatgcagaagaatataagaagaaagtaaaaatcacccattattctgaagcccagaaataaccattgttatcattttgagtctttttctgtgcagtgtttttctatgatattttgacagtatgatggttgaaatcatattgtactctgctttaaaaattttttaacttaaaattattcacaagcatgtttacaaggcatcaattgggcaatttatttacccccaaaagcctcagtggtaatgacccagtgtttctacttcacagagttggcatgaggttcaaattagaaaacacgtgagaaccctttgtaagtcacttacagaacgcacaaatgaaattatttgttctcatctccatgtcttgaggagtcaaaaggtccccattgattaagcagctgcagaaccctctgcagatcactctgaggatctagaaaagaccaagacaactattggtctgagagtttacagaaygatcccagagataaagccaaaacatgaaaacattaaggaaaaaagtagaggcttaaactctccttttgacacaagtagaattttgtcttaattacttaaaaagattatccaatactgaattccttctatccttagctctttcaatttgaaaatgagtcatgcttcaaaaaattattttttcttacctcagacaaaattataattttacctgcaataatgtgatttgtcagttgaatagtaagtttcctatcccctgaaaaaaaaaaagaggaaagaaaaagcctatttttgtaaattcagattatttataaggattggtttaaattaaaaccagtgtttttactgaggaaaaaaaatcttgaactaaaacaaaaaaaaaagaagaagaaaaggaaaagamtaaaagaattacaggcggtgcatggtggctcacacctgtaatcccagcactttgagaggctgaggcgggcggatcacgaggtcaggagatygagaccatcctggctaacgcggtgaaaccccgtctctattaaaaatacaaaaacttagccgggcatagtggtgggtgcctgtagtcccagctactcaggaggctgaggcagaagaatggcgtgaacctgggaggcagagcttacagtgagccgagattacgccactgcactccagcctggcgacagagcgagactctgtctcaaaaaaaaaaaaagaattataaaagagaacccattaagattctattaatttatgttatagaaaaaattaaaactatttgttttcaccacaagcatataaagaatattttttcataattaacatgttactatggaaaatccatatgtagcatgttaatgcctggaagttaaaatggtttttatattttttcttatccttttctacaaattttttatatgtattctgtaaacttttttgtaaaaacttttctgtaaatttttaacatgtatactgttgataatctgaaaaaaaaatggataaaaatggtttaaaacagcatatacttcaaagtaaaacataacagtaaaccagccagctgaaataaatgaggaatgggagaattcagctcaaacagacaaaacatagcaatatggtatctgcaggaaaccaatcaaatatttgccataagggaaagtgcatgcataacttattcgaactttttataaatcctctccctatgtaattcgctagctttacttcacattatttatttggtttcayagtatgtcaaacagctgtcaaatacaatggcagtgttttttcctgccttcatgaagtctaccaggaatataaaatatcagaagttgtccaaagttaaacaactttgtcagagccgggaattgaattaataggccaagggacgaaccttgagttagctggagctgagagatagattggtaagrgaccaagtagagtttaccaatactcagaagaagatgaagaataacacaggaaaagaggtcaaatgaagcagtcagcacaaagagagggaaatggattttcttaggggccagcccatagaaagcactaggttgttttcccattcattaattcggtaagtatgcattaccattggtgaatagattagagttgaataacattgactagagagcaacaaaacatctgagccaaagcaacatcttaggactgatagaggaagaagagtcggggaggggaagagaaggtggtcaaagatgtgagagaaaatgagaattgggatatcatagatgctaaatttaaaatgttccagggagagaaatgtcaactgtccaaagttgcttctctgagaagtcaagcargatgaggacagtaaaagcctgttcatttcaacagctggcaggaagtttgtgagttttatcatctattgcttgtttggtggattgacagagacagaaaccaggatagagtaggcagagaagttagggggggtggatgtcagaaaatggagttggatgagcagatgcagaagactaaagacatctgactgcaaaggaaagaaaaaaactaaggcagcagttagaaggggaaaggaggaatggagaaaagagtttttggtgtgtttgtgtgcttgtttggtttggttttgtattacattggttttgtttttgggaatgagagacttgagcatgcttcagtgctggatgaaggtacacatttgagagggagagactgacttttaatctgtgactgtaagcagccttgttgaaaagtctagaatagatcaaaaccagcaattcarctaacttcaacgaatatgtgttattcttatgggccagggatcaaacatgaacaagataaactccctgccttttagaagctatagtttggggaaaacttgctcataggaaggatattcaggcaacgggcaggaggccacataatgaaaatgtgacaaaatacagtccagaagaaaattaccagaaaaataaagaccaatgcaagcccacaagccaccacaaactctcccttctagcttggcctcctaatgctccctgtccagttttcccatccaagctttgctgctcacttgagatgctctggctcttctattctacctttcagatcctatattttactgtcattcattatttcacctattttccctgactactcaagcctctacagtctcctctgtttctaaattcctttactacttaatgttcgtaacagacattttggttcttaagtatttcctgagaggcaatgtggtattaagggaaggagctctaactttggtctcaaagcgacctggttcaaatccagcttctatcacttactacctataggacctgacaactactgtatttagtttctccatctctagaatggacagagaagtttacctctgatggttactattaagactaagtgaaataatatgtataaagcaactattaagactaagtgaaatactattaagactaagtgaaataatatgtataaagcaacttatacaaagtttgggcaacttatacaaagttgtgtgtatcatgagccctgtgtattagtccattttcatgctgctgttaaagacatactgagactgggcaatttataaaagaaagagtttaattagactcacagttccacgtggctggggaggcctcacgataatggcagaaggcaaagaggagcaagtcacatcttatgtggatgacagcaagcaaagagagcttgtgcagggtaatttccatttttaaacccatcagatctcatgagactcattcgctatgacaagaacagcgcaggaaagacatcctcacccccgccgtaattcagtcacctcctaccgggttcctcccaggacatgtgggaattgtgggagttacaattccaggtgagatttgggtggggacacagccaaatcatatcaccctactctgctgtggcatcttgggtaggtaacttaccatgactgtgccccagattcctccttataaaaaatgattcctaattggtatccatctcatagagttgttgagaagaatggggcaataagaagaatgagggaatacacatatggtgcttagaacaggaccaggttcttaggaaataaatgtttgttggattttttttctttactgccattatgttatcacagtaaaggatagtttacttaaaatgtttgcaactcaccctcaagcaatattgacaktcttattttcagatcatttcacttcagtgagcacaatgttttaatttttaaaaacgtttttgcattcttttgatttttctcttacgtggtttaaaaagtgggctttattatatatgcttcctcaattgtagttcaatactttaatactttaaaaccgccattatctgtccaagcatatattaattaaatgacctggtcatttaaatatatgtcatttaatgtcacaactcatgagccacyggaaggatcactatggtatcaactaatctttcttcatagcctatacttccttattgtataccaaaaaacccaaaagattataaataattaagactcataaagttacacattatgcaaatcacaatcactttttaaaagcaccccaacagaaaactttctctaagcaggacatgaagcatgaatgcacagaagaaatagaaataatcatcaaacaaattataaaaacttgttttacaagtcatcagaaaaatcaaatcagtagtaagactccatgtttatatgtgtcaaattaaaagagattgctttaaagcataatgttcagtgttggctggtaatataaattgctgccactttgaaaagtaatttggtaatatgaatcaaaatccttagccatgtgcataccctttgacccaataatttcactcttagaaatctgtcctgatgcaatgaccatagataaggataagtgtttatgaagaagaatattcaaacacataatcacttccttggtgatctcatttaccctcatgtttatagacatccctatacaatgctgactctcaaatttatatttccaagcttgacctcttccttgaactctggagtcctatatgcaactgcccattgacacctccacttggatgtctaataggcrtctcaggtgtaacacatacagactgaccccctgccttctcagcccccaacacatacaaccctatgctactaccagtcttctccatttctgttggtggcacctctatccttctataggagtctgagccaaaagctytgtggtctttttcaataagtcctactggttcttccttcagaacatatccagaattccactgcttcccacagcctctaccactaccactcttgtccaagccacaccatctctctactggattcttgccgtggcctcttaactggtcttcctgcttttgaccttgccctcttgcagtctagtcacatagcagcccaaggaaacattttttaaagttaataagatgatgtcactttcctatttgaacccttcaatgacattcactctcactcagaattaaatccaaagtcattcccatgtcccaggaggccttctgtatgatgtagtatcctgttctctctatgaccttatcagctcctgctttcctctttgtttatcccacttctctcactgtcccccyactgttgttagaggccccatgcacaattccacctcagggccttttgctgtttccctctgcttccatgctgtgccctgatagtcacatggcttgcttcttactctcttcaagtctttgttcaaatgttaccttctcattgagatcttccttgacccactattaaaaatgcaacaccccttaaccacactcctgatccttcctacctgctttatttttctccaggacatttattactttctagtataccatttcatttatgttattctttgtctacctcttctggttagattgtaagctccatgaaggccgggattttttttgtctgttttattcattgctgtgcaatgcctagagtggtgcatggtacgtggaaagtgttcaataaatatttgttgaatgagttaataaatttacaagagcaaaaaaaggaaataaagtccaacaatagaattgtcarttatatcatggtacattcaaacaatgatatgttaatggacattaagaattagttttcagagacttttaataccatagaaatgtatggaattaaagattatcttaacacattatactttttaagttttattttttaattgacatataataattgtacatatttatggggcacatagtgatatttcagtacatgtaaggtgcaatgatcagatcagggtaattgggttttctgtcatttcaaacattaatcatttctttgtgttgggaacattaactatcttccttctagctatttgaaattgtatgataygctattgttaactatagtcatcctatagtagtatgtaactctagaacttattctttctatctagctgtaattttgtagcccttaacaaatctctgtatcatccccttccccctactcttcctggcctctagcatcctttgttctttttacttttgtgagatcaactttttcagcttccacctatgagtgagaccatgtagtgtttaattttctgttcctggcttattttacttaacataacgtccttcagttccatctgtattgctgcaaatgacaggatttcattattttttgtgactgaatagtattctgttggatgtgtataggacatttagtttatccattcgtctgttgatgaacataggttgattccatatcttggcttttgtgaatagagcttcaataaacatgggggtacagctgtctcttcagtatactgattgcttttcctttggataaatgcccagtagtgggactgctggaccatacagtacttctacttttattgtttttgaggagcctccatactgttctccatagtggctgtactagtttacattcccaacaacagtgtatggcctacccctgtttttgcaccttcaccaacatttgttgttttttttatcttttgataacattcatgctacctggtgagatgatacttcattgtattttgttttgcatttccttgatgattagtgatattgaacattttttcatatatttgttggccatttttcttcttttaaaaaatgcctgttcaggtcaatggctcattttttaattggattgtttgtgtttccgctgtggagatgtttgagttccttgtatattctggatcttaatctcctgttggatgaatagtttgcaagtatcttctcccattctgtaggttgtctttttactctgttaaaaaaaattttcctgtcacctgggctgaagtgcagtggcacgatcctagctcagtgcagcctcaaactcctgggtttgggcaatgttatactttgtttcatcttgaaggaaatatagcaaattattaactctggtgttctgtaggtcagcagtccccaacctctttggsacaagggaccagttttgtggaaaacaatttttccatggggttgggggattgtttcaggatgaaactgttccacctcagatggtcaggcattagttagattctcataagaagcacacaacctagatcccttgcatgtgcagtccacaatagggttcacgcttctatgagaatctaatggcactgctgatctgacaggagatggagctcaggcagtaatgctcccttgcccactgctcacttcctgctgtgcagcccagttccagcaggccatggacaggaccagtctgtggcctgggacttggggacctctgctctaggtgatgtttccaagaggtttcttttatctcttttgtaattctcttttatttctaaatatgcacattgcttttataatcagagttttctttcaaaagctatataattcatgtttcttttcaaaaaaacatgtaatggcactgcttgggcratgggtgcaccagaatctcagaaatcaccactaaagaacttatccatgtgaccaaacaccacctgttccccgaaaacctattgaaataaaaataagaagactggaaaaaatgtaatggaaattaaatcataataataattatagctrctattgataaagggtatcagagactttatgcacaagggctaggtcttctatgcccattatgaaagagacagaaaaaaacaagttttatagtcaggtcctacttagtttctttaagcctctatttgctcatctgtgaactagcctaacaatacccccagagaatttctctgcagattaaatgaggttaggcatataaaatatttggtccagtgcctagcacattataagcccttgataatttgtaggtgctattcctatttttgttttggttgccatcattatctcccatatgtttaacaacctttaattataatatggataagactattatatttatagagataaaataatttgtccaagttcacacagcaagtgagtgatagatccagaatttgtttcatccctgccaagatgcaaagcccatgcctggtctctctaccacaccattctrcctctaccccaggaataagggttgcaaagctttattttcacagtgagcaccaaagtgtatggtatcaagttattcatactcagctgccttatttttgacattctcctctggatgaatgtgtgaacatgaaccatatgtcttagagttaaactttcaggaaagaacgtgtgattttcaacttgtggacaatttttagtttatagtatctctactcttcagtaaggtcaaatcataatgacaagaggttgtcaccgggctacaatgctggtaaattactcagtgacttaaaattcgcttttaacttatatataccttaagcagaagacttagtattttttccatctttaaaataaaggttttnatattagccttcacccatcattgttaaatgtcaacggtctacctgtgaatagtatcatcttcacttcagaaatgccaaggctctgaagctattttctgttggtctttggttccgaaattaatcattctcaggcaaacttgtgaggtgtattaaaggaggctctttatttcttccaattgaatcatgagttcattatttaatagttatacatgcatccttaaggattaatatagtatatgggttgagtatcctttatacaaaatgcttgggaccagaagtgtttcagatttggggttttttttggggggagggtgggattttggataatttgcatatacatagtgagatatcttgggcataggacccaagtctaaacatgaaatttatttatgctttttggatttctggtttttgttttttgagacaggatctcactctgtcacccaggctgcagtgcagtggagcaaccatggcccactgagacctcccaggctcaagccatcctcctacctcagtttcccaagtagctaggagcgcatgcaccaccacacctggctagtttttttttgtttgttttgtttttttgtagagacaggttttccctatgttgcccagactcatttatgttatatatatatatatataatatatatgttatatatatgtaatatatatgtaatatatatgttatatatgtaatatatatgttatgttatatatgttatatatatgttatatataatatatatgttatatatacgttatatgttatatatatgttatatataatatatgttatatatacgttatatgttatatatgttatatataatatatgttatatataatatatgttatatatattatctataatatatgttatatatattatatataatatatgttatatattatatataatatatgttatatatattatatataatatatgttatatatattatatattatatgttatatatattatatataatatatgttatatatattatatattatatgttatatatattatatataatatgttatatattatatataacatgttatatataatatatatgttatatataatatatgttatatatattatatataatatatgttatatataatatatataacatgttatatatattatatataacatatgttatatataatatataacatatgttatatataatatataatatatgtgatatataatataaaatatatgtgatatatattatatataatatatatgttatatatatatatatagcttcagagccttggcatttctgaagtgaagatgatactattcacaggtagaccgttgacttttaacaatgatgggtgaaggctaatatgagtcaaaaacctttattttaaagatggaaaaaatactaagtcttctgcttaaggtatatataagttaaaagcgaattttaagtcactgagtaatttaccagcattgtagcccggtgacaacctcttgtcattatgatttgaccttactgaagagtagagatactatatatatatatatatatatatatgttatatatattatatataatatatatgttatatatatgttatatatgttatatatatgttatatataatatagtgttatatataatatatatgttatatatgttatatatatatgttgtgtatatatatacacacacacacaccttatacacatagcctgaaggtaattttatgcaatattttaaataatgttgtacatgaaacaaggtttgtgtacattgagccatgagaaagcaaagatgtcactatctcagccacccgtgtggacaatctgcggttgttggcatcaccatcattcctgactctgaattcatatgctaatgataagcaatcattttcttacacttactcacacataggacttaatggtaaaaaatatagcatatcattaatacagtgaaaaaataatgtgttccgtgtagctaagcagcacagtagcatcaccrgaatccctgtacgggttgagccttcctaatctgagtatctgaaatctgaaatgtcaagtgtggaattttccacttgtggcatcatggcagcactcaaaaagtttcagattttgttcatttcagattttcagattagggatgttcaaccggaatatataatcttaattttatgatccagctccatttaacaattaaaggtggttatgtatcactccttagtcaacctataatatttgcagtttatgtcaagtctaccaaatgcttgatttatttaagtggtgctcattcatccttattaaaacccttattcaaagtgtttgagatgatggatatactgattaccctgatctattcaccataaattatatgtatcaaaacatcactatgtatgccatgaatatgtacaattattatttgtcagtaaaaaataaaattatattttaaaatgttttataaaaaattatattcaaaggagtttttgttatccactttacagatcagaaagctcaagttcagggaggctaaataacctttctaaaatcagamagtcagtgataaagccaggcttcaaaccaagatctgtctaattccaaagcctgtgctctccccagtccacaagctcaaaattattgagaagagtatacatttttatcaagatccagttttaaaatatagagaaatatcaaacattttagagaagtgttttattagaaaattgttttttcttatgaaagcagatgctcctattatttttccctaattttcttcttcaaataaataatacatacttctctcttggaatgttgtaggctttcccaaattattcatagtaatacagtcctctgttgtcatcttgatctgccatcacatgtattaatctttttgtctcctatatcaactgatcatgagagttatattaattatggcctctttatataatccgaagataaaaatgggaccatacttccttttgcattatatacagtatagaaaaatggtaaatgtgaattctttaaaataagaatgtacaatattagaattacttgtattataaagaaatagtattttactttagaggtaaccattgctttctaaaggtaggaaacatttgagtagtttcaaaaagtgttttgacaaaarcattaaggataaatttgtcataaattattaaaggaaaacaaacaagttttagagttaagagtgtagtcatgcccttccacaaaacgcactttaatgccgctgccaataaatggcatttgcaatatggcatttgctattaatgtgagatagcagttatatctgctttgagaaagtcatataatttctccatgttgctttccttcccaaagcagcatccagtgttgtagggaggaacttttccccgcagctcctgttctgtccttgcagaataagtccaaagtggcaggagctgcctgctgtgagcctgggagtagagactagacrggtgtcttctagagggttctgatcccaccctgctggtcctcacctgctcactcctgtcccaagccacgggtacacagcttttgttttcacacttcacctccagctcygtggagaactccagcagtgagcttggctgccctaacacttttccccgtaagtcactgaaaagctcaaatctcaaagctgaaaggaagcaactaacagacaaactctgtctcacaaactcacacgcaacctcaaagccctacaggctctctcaaagtaaactttcacaccatgcagaaaaaactacaaacagacttggggggacttggatcacaatttattttccaactttttgcatgattactagataatccaccacattttaatgaaaggggtttaaaaactttaaagatgaaaataaaaattaaaattaaaaaaaactttagagatggatcaggattctcaaaggggacagtggatagaatggaatggacatgacattcttcctcttggctgttctcccatttagtacagtctcttgtactggaaagtcacagagagtggaaggaaagaagtcttttaccgcactgtgggtaaaaagtgagtgccagactccaaccccagcccagtccagctgggcaaacctgccaagcagtgccaggccagcagcttrggaaccagattctgggatcctccatcccagctgcacatagcttccagacaggccagggcctcctgaatcattcaagtgctcctgaagttattctggctgtccattgctatcctaagttgacaatgagtgccatactttgttctacagcttcttttgaagtctttcttaccagttatgctttcttctttctaaatcatttatgtgtggctggatgtcacatttcattacctatgactccatcccatgctgacccagagaggatgtgggtatgaaaggaactataaatatttacactccctttccatttgcatgtcttcacacagttaaggcacatcccccttgcagtcagaattctgcttaggctctgattcatggtaatgtgcttttattcctaaccacagttctcacatgaccaggaccccttcttggcaccatttagcatcttccaaggatatatttrtatgggttatttaaaggagcagtcccacgctgtccaggagctggttatctagtctgtctattctctatgcaagaggacgaaggggctcaatattataattttccctgaagccaggagatctccaggtggaaagagtactttacagcactggaggtgstatttggaaagggggtttcaacccaatgacactatcagtcctgctggtaagtccttccctatcttgagtaccttaatctggttaatttttttttctcatggccacccaccccacaggcatttaatcgttcacttgagagtatagtgcaaagaatgtaggcttccaagttgggaagatgtaagtgctgacctctgactcagctgacactggagcaatttactgtccatctgggtcagcttgcttctttacaggcagaaatgaataactcctcctctacaggttattagaaggacttaaaaagataaggagcttggcatttaataaatggaagtctctatgatttcactattccatagatagtatgcagactaaagaataatggagggaaaagaaattaatagttattaagttctgatacttattaacactccttggaaagatccatcatgggagaaggaagagggaaggaagtaacagaattaggtgatttgattggtcaaactgcttgacctctcagaagtgatcagtagaaagacttgcacttccccatgaaggtgtgagttcatctgaacttttgggtttcttttatctgcttctgattttgtttatcaatctttttcccaattcttactaatgcaacatgtgctgttagcatgtccttatctttgataaaccacttcaaataataccacatacttctcatacatttttaatcactgtcacttaccagaccttgaataataacactagatttaaaacaaaaaaaaaattccttggaaatgttacagtgaattttagaaaagtgcttaatgaaaatctaacaacaaaaattgcacaacaaatagaaatggatgccattttctctttcacagtaagttatgaaaatgcaaccattaacccaatcatgataataatttttatgagcccttgaacaccaaaatttagacatccaaagacttcccacacaccactctcacctttttaatggaaaaacagttattacatttcaacactccaggaaattaaaagaagaggcatcttcaacaaactaggcttgtggttaaatctctatgtttaatattctgaaaaagaagtatgactcttagtcattcttaatacatttaacttacagtgtcaaaatatcaatgtttcctaatgagcttctaaaccttgtgttttctttgatcaagaagaagtatctaccaaatcaytttggatatataaggactcaaaattactcatgcaaaaagtagtattgggtaaaagagactgggaagtcttgtagtcacctgaatgtcacaattttcaaacattttggtgttctttctaaataaaatgtgtgtgtgtgtgcgtgtgtgtgtgtgtgtgtgtgkacatgtgagatgaaagcatcttgtatatatgagttagtgccaaatatttgttcttagaattttaatgtgagcattgaccagtgacaaatcccacataaacaccacttcagtggccgccttgtattctattatagggatctatgtcatttgtttcaccattcttttattctttgatgtttaggtttccaagtttttaaccattataaaaatgtgacaagcatctttgctttctttatgtccacacttttaattatttttttggaattgtgtctaagaaggaaatttcagattattttttatcctcttgatacatattgcaaaattactttccagaataagcttgtaaccgtttatactcccaccagttgtgtaggaagttcccacttcataacatccttgccagcatgggcactctcatttaaaaaaaaawattttacatttgaggcatagacttcaaagatgagagtcttagatgccatttagtgtaaccttttattcaataatttgtcctcccaatgctctaaccgtaaattccttgaagaggattccatgttatctattactataatccccaattgcttacatatattaatagtaatacagtaatatttgctgaggtagtgagtgaatatgtgaattaacatatgattgaggccagctgcgattgctcatgcctgtaatcccagcattttggraggccgaggcgggtggatcacytgaggtcaggagtcgagaccagcctggccaacatggtgaaaccctgcctctrctaaaaatacaaaaattagccaggcatggtggcaggagcttgtaatcccagctactcgggaggctgaggcagaacaatcgcttgaacccgggaggtggaggttgcagtgagccgagatcgtgccattgcactccagctggggaggcagagcaagactccatctcaaaaaagaaaaaaaaaaaacaaaaaacatatgattgaatagatgtccttaacagatagtcatctaattgtgagatcattattcaaaatttaactgtgtactccctgaagtaaattgtaaatttacttttgcttttgaagttaccatattcttcattttttaaattattgcgaaatcttaagcattacactgtaataagtatatcagaaaagcctacttaaaatattatcctaacatcaaaaattgcccaagaaactatatgtatgcctttcagcccataaaatacatatatagagtaaatgtgtcatttctgagattttcatttagaacactgtcatttcccaacggaattaattctagctcatagtccgtaagaactcacctgaaattagattggtatctcagcttctttactgaggcatgtaccaaaaacatagaattaagttttagcctcttaatttgcaccattctcaatactgtctcataataattcaaagtgggtttttttgttctcttggccaagcaaaatgcccttgggcttgcttttactctttctcttttaccttacttgatagcaaagtgtccaattaattctccaagtagttatcatgaaatcctcccaaatagaatttccttcagattgaagttctcattgcatttcagttcagtccttttatgccaattgaggtaatgcttttttttttttttttttaagaaccaagagaaggaagcccaaaggtcaggtttagtaataccccttccaaatatgttttatattcctgggtctcttyttctataagtacgactttgttttaaagaaagagtatatagtagaaaaacttaaaagttgtcattgaggctgaggtggaaagatcacatcaggccagtagtgcgagacyaacctgagaagcacaatgagaccctatctctacacaaaatgtaaaaatttagccagatgtggtggcacctatttgtagttctagctactcaggagaccaaggcagaatgttgcttgagcccaggagttcaaggttacagtgagctatgatctcaccactactctccagcctggacaacagagtgagaccctgtctcagaaaaaaaaaaaaagaagaagttattgaaaaatcagttaaatattcactacagttatctgattttctgatttgtccattttaattatattagtaaatgcattcttaccaaactcttaaaattaattattttccttttgacacgggcctatgtaccctcagtaacaaggtcaccatttattctgtgcttattacatgccaggcaatgagctaagtgactcatatttattatctcatttagtcctctcaataacgctgtactatagggtattattagtttcactttataaatgaggaaacaggctagagacacttgaagatacttggccaagtcactgagctgaagagcaagagtgttttaattgagtcaagccaggtcagaccttacgctcatgatacttggaggtaacacagagtagtgcagatcatcaacctaagcaggaattacaaaataattttatctggcatgccaaacttgatcagtagcccatttacgtgctgtgttgaggcaggtgaacaatttgagttctatcagaaagagtgtcacattctgcagtaaatgcaggaaaaggacatcrgggcatgcatgctggggatctgccatcccaggcctaaaagaaacaatatcaagtggaaataagaacagcctcagagctgtacttccctaggtgctgatgctccatgccccatctcctaccttctccttgggctttgttaaatgtgccaagagattttctttttacaatctataggttacaaatgttttgatggactggatcttcagctattctgcaagtcttcctaggtccctgtctaggagtatttgcaatatgtcatctgtagagctgggaaactgaatcatcttagtgctgcacttggccctttcctcctacagccacacaatagaatgcagctcttyagagacgctgtgataatcaaatagattcaaagcattggttgtgtatgggagatagtgtagtgcaaaggatcatggtttggaatttggaagcctgcgactgactcttcaccctgccacttgctacatgtgtaacctaatgactgaacatctgaacccctgtttyctcatctgtgggaataaataaatcatgttaatatttatttccctaggccgctgtgatgcttaactgagagaatgaaggtacaaatgtattgtaaactatcaagacctcgttattagagattggtgtagtagctaatgctgatatttttaaaatgtttaacagtttcttaygcaaaatacagcagtaaaatttatactgcagtgtcgaacacattcagcacagcttcagactcctggctgtgcgtgaaaactccaagaggataccactggtttatgtcacttgagactccagacattgaacagtaattagggaacatgacagtaatttgatttaaagtctgcagccacagagttcaggctccatccctctctccatcattctccctgagtgcaaatccagagggagggcaagtargtcgaagcagactctgatggtgtttacttacttgccagagattagagaaagtgtgcccactaggtctacagtagtgcaaaaccaagccaaaaagtgagcacttcagtgcactcaatgccaaaaaaaaaaaaaaaaacaaaaaaaaaaaacatgtcttactttttttgtcattactgacttcatgagtagtgcatgtaactatttctaygggtcttctctttgattttttttctctttgattttcaaaaagaaccattaacattttaatgttatatttactgagaggttgcatgatatcagccaaagtaaaagggatatggatgaaataagaaatacagaagtctggccaggcacagtggctcatgcctgtcatcccaacactttgggaagacgaggtgagaggatcacttgagttgaggagtttgagaccagctgggcagcatagtgagacctcctgtctacaaaaagataaaaaaaattagctgatcatcatggctccttgggaagctgaggtgagaggatcgcttgagtctgaaggttgaggctgcagtgagccaagatggtgccactgcactccagcctgggcaacagagtgaaactctgtctcaaagaaaagaaaggaaatatagaagtctcactttaatcattaagtcacaccattaaataacactggtccgtactaaagctgaaataagcaattatatgactctacttgaatacttaaataaatatgacaataatttgccccagcagtacgaagcagctcctctcccatcttttgtgggctgtttctcccctcagattctgtgttgtctttcttggtttctctcttgactcttgtcatactctttatggaagctcaaaacacatataccagactccctgtcagtggggtcctctctacttgggtgtcacacaaccaactgagtttaacacagtttatccaagactgaatttatagtttcttcccatccccaaacatgcttctttcctatgtcccttacctcaataaatgtcaacaccatctcctaagatgcttatgtcaaaaacctcagtcatgctagaccaccctctctcacttaggcccaagttctcatcaccccaacctcttgatgtctcttcaggtcagcccctcctcattagtcctgctgccactgttttgatttagtctcttcctccctcccatgccatcttttcttgctgacattactacaataactcactgctttccctttttctagcctagtcctttccaaccaatatccacatgcttcatgggcaatgtgtatgatcatgtcactcaactgcttaaaatcctttagtgctttcttattatctcttgggtaaaatgaggatctcttagcatgacacttagggctactctatcatgttatcttctgactgtatagaaatactaatsgttccttaagcgggtgatatagttccatacttctgtgctttaagagatgttcctttacatgccttgtttctttttttatttaatttttcttgttatcctgttagcatcccagtatacctttgcatgccttttcccctaggagaatgcccaatgactctttaagccttaacttgaatatcacaatctctatgaaacttttctcctttgtgttcctatagcaacctgtaaatacttccttgatagcacttatcatgttgttttattatgaattttttttctaaacatcatgagacaattttattcaaatttcttatatgcatctctaacatcgggtatatgtcatcataaaagccactctttaagttctctcagttttccagaatgcatgaaactcacttccacgtaagctgtttgagacacagcgctttaaaaatccatgtagggtgttatgaaaattttatcccaagtcttgaatacccatttgaataacatttaatttttttcattcttcttatatgtgcatattgataatctctgcaatgtgatgacttacattgtaaggtccttacactacaggagaaacagtataatagtattttttttttagatggagtttcgcttttgttgcccaggctgtatgcaatggcacgatatcagctcactgcaacctccgcctctcgggttcaagtgattctcttgcctcagcctcccaagtagctgggattacaggcatgcaccaccacgcccagctaatttgtatttttagaagagatagggtttcacccatgttgatcaggctggtctcaaattcctgacctcaagtgatccacccaccttggcctcccaaagtgctgggattacaggcataagccatcgcaccaggccagtataatagtatttgaaggcagactctgattaactaaaaattcatattaaagcaagtttggattaataaaaaacctggagagagaatatgtgaaaaaaatatgcagatggaactgagagagctctccagggaagataaaggagctattaaggtaacaagaactaaggttgatgcaattaaaatgtcaggaatgcttacaatctctaggctgaggggagttttagataggcaggacagcaaactgccgtcagtctgaatagaaaagaggtaaaataaacagtattggaagtgggttrttattccagctgttatgtttgagatgggcctgctttcatagtcttggaggtctgggcagaaacacaccacagcaggcacaagagacaacatgctgggttgctgctctgtaaaaatcatgtttcctaatcctgctccccaggcccacagttttgtggccagaacctgtcatgtgttctttgatctttgtgggtctggggtgatccagcatgagaggaaccagcggttgaacaggaaggagcactgtgtggcaggggtcccttgctttgggtaagccctagcagaaagcttccgatggctgtcttccccatagataaatacctcccttgcgatggatgcagttggcatcttcagcaccccttctggagacttgcctactgtggttcacagagcacattaatcatcatcattatcgcagatcccagaaaggaagaggctttaggtttcttgcttcctttctctgctggcagcaggtgacagcagaattatttatcctttggacttaggagtcccatagattagcgtcagagatttggcctaggactctgcacagatttaaagggccactggttgttgtatttagtgtcctttgttcctagtaacccaggtaaccttcatggtggcagtatgatcccctgatactgcaggaaacgtaagggtgaaggagcatgttctgtgttataaatttatgacttaattagttactttcttaacatcttaggtaggaatttgggcttaagcagggcacatctatctttaaagaatacacaagttttccaagttgaaatttgaaagtaaaataaatgtaaggaacagaaacaagagagattatatacttcattactgctgtttgatctccatgctttcattgcatggtaatttttctcagattttaacttgtatattacatgaatctaacaaacataaataacgtatctgggtcagtatttaacatatacatttcgtaaaggtcttgaaagccaatggggtctaaaacatgtttgattatttattgtaagaaggctggattttaaatctgcttctgtagcatctcaacagcttgcagggttccaaggaactcataattattaatgataaatcctgaagtgtcccactgagcccacagagtaaagaatgcttgagtaaagaatactattaagaaggcagacactgaatgagccagctgaaatgcaaagacacgagagtgcaatttctctttggcatcctcctcggcaaggtgggatgccagaaacaactgctgagtacaccatcatgccagccctggaggttggaaggataatggggtgacaggcaaaacccaagcctagagcccccagagcagtaataatagctcacgtttatcaagcacttgctgagtaccagattctgtgctaagtactttatagccaatcctctcaaaataccctcatttttgagactagaaagggtaggtaactgcctcaagtcacacaactagttaagtgatagagccaggactctagagcctgcatttccaaccagttgcactctaccattccccacatttcatctggaggagtctcactcagttcctcaaatatttattgaccatttacaatgtacaacacatgtgctatgccccagtggaaaactgtgaacatatttactgatttaatcaacaatcatttattaagcatcttctctgtaccaggcactgtgctaaataagcactggggagtgcaaatatgactaagacatgatccctgacctcaaggaaagtataggctagtgttgggcacagacaagtcactcaacagtcctgggtaccatgtgctgtcaagatgtgtgccgcagagacaaggccatctaagaaggtcagagaaagtctccaaagaagagatggccctgagctgagtcatgaagggaagataggaattagctgggtgaagtgtggggaccaaggcatcctagccagagagagcatggaggtgaaagtgtggcatggtgaggaaactccattgtggctggagtttagagtgaggtaggactttgaagaagtgactctgaaaatcctaactccacttttcattttaatactgttaatgctttaagcttgagggtctstcggagcattaattctctctttcttaagcaaaagattcattttagcacatgctatagattgaatgtttgtgttccccccygaatttgtacattggaacctagcatrtaatggaattaggaagttgcttccacatcaacaacctttggaaggggctagagagacctttgggaggtgatcaggtaatacccagatggctcactttacccttctaccctgtgaagttatagcaacaagaatgtttatgaactggaaagagggccctcaccagacactgaatcagtcagtgccttgattttggacttctcctccaccagaactgggaaaaataaatttctgttgtttgtaacggacctaatctatgatattttgttatacccaatgggctaagacagcccagattccagtcacttatttatttcttcaacagatatttaacacaggccagctatgtacaagacacatgtacaagacaccatgcttggcaccaaaagaacaaaacatggtcctgctttgaaagacattgtgtacaggagggcaagacagacatgcaaacaagcagtagcaaaatattactttactaagtgctcaatagtgggatatccttgacttcacaggggtttgcttaacaggtctgaacaaaggaaatctgaacaattttcttcagcttataaatatttggggttcccaggtaactctattttatcattaccactattctcctactattacccactagagcattcagagttctctattttgtatattcagctaaattatagagacacttatttaaaagtaactaacatcttacyaggtgaaataaattccacattgacatggaagcaaccctaataaggatgctagatagcattaaaataaacaaagtagtagattaatgagaaaaaacttaaatgcattattgcttgccagacctcctccgccatgcacatgccacacccctccacccaccctctgcacagggagaggctgcccaggtcaaaggtggttgctgcattgcctggagatctcggacaaccattttcaccagttcctccatgaacttttataaaaaagattttcagacattcttttcattaagaaatctttttctgcattaaaaatgatattaagtcctttcaatcgttttcccataaaagaacccagatccttttacactttctcgtaagacccattttataatcttttaatttttttttttttttttgcttatttctgtttataaattatgctcaaaatgcaaaactggagcaaatgatagtaccagatttaaatattgccatttccactaaagatgtaaaacacttttttaaatttttcatttgttttagagacagggtctcactctgtcacctaggctggaatgcaatggtgtaatcacagctcactgcaacctcaaacttccaggctcaaataatcctcccatctcagctacctgagtaactaggaatacaggcacgcaccatcatgcctggctaatttttaattttttatagagagaggatctcactctgttgcccaagctgatctcaaactcttggcctcaagtgagtcacccgtctcagcttcccaaagtgttgatattacaggcataagccagtgcgcccagcctagaacacatttttgtatgtttttattctattttatcccaccaaccatctgtggattcttgggcaagtcattaacatcttggggctttggtttcctcaactgctaataaagagttaacatggatactaagcactgtctaacagatcttctagccttcaaaccctatagtgatggatgttattgttaataataatactctttcatccagaatcacagtattcttgagacacctttcatcttgagcctaaatcctgccaagttgattgctaaaagtaaagcttgttcagacaacccacttatggtcctaaataaaagaaatacaaagagaacaaatgaatatgttcacaaattcatttgttatacctaaataaagtgtatccctagaacatagtttagtaccatattagaaaaaccattattatgataaatgtcagcagaatgattcaaaaacatcataatgagtatttgaatagattgctttaaaagacatttgattaaagtcgtacatttttctggagtttttgaaaagtaaagtttaagcataaaattactcttaaagtaatatttactgaaaattaagagtcactatacttaacaaaaatatattacacacatttccaaacaaaacaagagtacactttagtgcactcaagttatctatattattaaggattcctgccactgtgagaagtcataaaaaatgggggattaacacaggaataaagaaagacaaagattaccatttgcaaaccatttatggttaggaaatccagggtaataaactgaaagctatgtgtgatgatctagaaaatctagtaaagtgatcataaaatgaacaataatgaaggaaaagagatgccattccccgtatcaaaaaaatgctaaatatctgctacttatgctaatatggcattctctagcactgaataaaaaatattatgaaaccttcatgggaaaagcaaaggactatttgagtaaaagccaatatatttcttgtttctgaccctaatgttgaagaaccgtcaaagttactacaattccaattaaaatatcaaaatgtaatatcaacatgtaaagaactttataaaatatgaaatatagagatatgttaaatcaagtgtttttaagtgataataatgccctatgaaatgagtagctatcaacattaagaaaaataagccacaatgaactctagttgaatgaaacagttaaatatatggggtttttcaatttaaaatgtaatataattgctccagttattaaggaaaatgtatttcccttcactattgagcaaatagaaaaagggtggatgaatttcattattaaaagattaaaaatgttatattagagatataataaaaccaccatgaatatgacagtttcttcatatctaaatttcacatttttaaaaaaagccataagcataatagcaggcccttattctacagatgggcacgaacagacattatttagaaaaaagttcatacttggctgttaatcagggaaatattaagtaactcaaacgtgcagtaccacctcacaactacttaaattatcaaaaataaagaaactctacagcgacagagctgtagagtatattcatacattgcaggcagcagtgttttacactatggttgtaaaagatagttgaaagaatgtaacaaaatctttcaaaatcctttttaagtgcaatatttctagaactatgtagtgatggtgataattatatctactacacttactggaaaactaaattaagccctgcactggacactttatagatattatttcatatccttactgaaatgctacaggtggacattactgactgtgttttaaagataaggaaattgagactcagaaagggactcagaaaagctacataagtcgatcagatcagagagattcaagtcttggtttacccaagctctttctaccaccccatgctgcctctgaaacagtgcaaaagaaaaacagaagagaaaataaggaaaaagaaagatgaaggaaaataaaagaaataggacacctttctgaactaatccacatgcctcataacagaaactagaaataattcaatgcccaacagtcactatggaagtgagttcaaagtatataatagcatctatcaaaatggacacacccctcgtatgcagcaatacttctaggattcggtaatgatgacactactactactacaagtgataaccaattagtgaatagcaggactgagggttgtttggtagtcgtggagtgagaggcagaatggtatagtggaagtacatcgcctgggtgcaagtcctagctctgccccttactagatgtagaacagtaagtttaactcttaaactctattcatcaacagccaaaatttgttgattaatatattgctattaagtgggtgagatgctcaggacagggcagttttcttcatgtatcagtgacattttgggtagtctgacttcrtgaaggtaaattgagactttacaaagtgtttttttgtttttgttttgttttgttttgttttggagacagagtctcgctctgtcgcccaggctggagtgcagtggcacaatctcggctcactgcaagctccgcctcccgggttcacgccattctcctgcctcagcctcccgagtagctgggactacaggtgcccgccaccacgcccggctaattttttgtatttttagtagagagggggtttcaccgtgctggccaggatggtctcgatctcctgatctcatgatccacccaccttggcctcccaaagtgstgggattacaggcttgagccactgcgcccggccagactttacaaagtttttaagtgtgtgtttctgtttctgtcttctccctcttctctgcacccctctcaaaataataaatattttggctacattttactattaggcatcaaattcccactgttcataaatatgtgtggtcaacgaaaaggccttttgaggaaagctttcaatatgaatgcaggtgcaatatacacaacaaaaagcaatgaacctggaagaaatggaggtaacacaggaaatgcgagaaaacattagcagcagtctagttacatcttcagagaaatatgagaaagtagtgtcaccacagaacaggaacaggattccatgagagaatgaatcatgtagtagaaaagagtggcataatagtatttagagatcacaaccataggaggtgaaaagtggtataagagataaatcctaaaactgagaaatcaagaaatagcagtcaaatatattgtttataatggcaataacttccagcggaaacagctaaaataaaaataagtttgcctgcaagagagtagactgctatttttcatgaagccttttgatatcatattatctttcttttcaaactctgtgtatatattactttgatttaattatttttaaatttttaagaggcttggaatagtcataaccttgcttagtataatagttgtgttcctggcaatcacagagtaatttttaataaatcaatattagttttctttgagcccttagtaaatcaaatacattattttaggctgtgtgtgaaatttagagacttgcaagaagtccattccttccaagagtctatcatttattcaggatggcaatattataaggcaacatattccaaatattaaataagagtaacagactgacactgtctgtctctggacttaagggtggagatgatgtaggcttcagttcatggagaagggggctagagctgagtgtttaaaagaaccttgtgattacacagaggagtgtggaggactgtggggtgaaagggagcacacaggagcagaggcaggcagctcatatgacactgtgagatgagtagtaagccaggttggcagcagcataagatatgtattgaaagggtgggggaaaatcattatgaaagggcagcctgaagataccatgtcaggggaggattttatctcataggaaataataagtccctgaatgtcttgtatgtgtttgaaaatttctggagtgtatgataaaagctgttacatatgtataatgtgtagtgatcaagtcagaggtattcagggcatccatcacctgagtacaatacatttttgttaagtatagtcatcctactctgttatcaacatcatttaatttattccctttattttaacctatttctcttcatcctcccctctccctgcctgcgctcacccttcccagtctctattatctatttttttcacttcctacctctatgtgttcaaattttttctctctcacatgtaagtgagaacatgcaatatttgtctttttgtgtctggcttatttcactcaagataacgacctccagttctacccatgttgctgcaaatgacaggatttcattccttttatggctgaatagaattccattgtgtaaatgtgctacattttctttgtccgttcatctgttcatggatgcacaggttgatttcatttcttagctatggtgaatagtgctgcacctgaatgtttttgagcaagatataggcaagatcagcctgctggtaatatgtggcttgctgtgaccagaagactaagccagaagtcaagaaggagttaagcaattatagcaacctttcagctaggacatgagcatgactttaacttgaacaatggcattggcaatggaaaggaggaatattagaatgttaaagatacaaaaacttagggatacacaattttttcatctctgaggaacattaaatattattttaccctaattgtcactgtaaatttctagaatgtcattataatcaatcagagctttgaccagcatgagttaaccactattactactaagttgacaaggccaagcaaagaaactcaaggttttagcttacatttaragcatcttcgtgacataaatacaattcccattaggcattctgaaatgcaaaatattttttaaagtaacttgtggatgcttatcactgctttcctaaaccccaatcatactcccaggctggaaaccactgactggacctagaacgtcttcatttataggtgaagaagcttaatcacatgtgtctgaaaacatactccaagtgatgagcagcatggagtcaaaacaagcctcttgcatcttgcttaaagttagctacattctgctgggaattaacaggacttggtatctgattagtaacatttttagggaacaactgaatcatttgaaaagcaaataatcatcctttcatttatcttttgtttaagactggctttccattagtaaaggtttgctcagagcaatgtaaaccattatttctgtgttaaaattggctgctaaaaccaccacctggatacttttgtctaacattgatttctcagctgcttattttcttattatcctgccattttaaatgacaagcattactgtttcttgatccattatgacataatgccatattaacaatcatattgtttgaaagttccattgtcatgcacatatataaatgaggctttaagagactcaaggtttgaattcctcttattctactctgtaacattttttcttccataattctgcaaatacaatatcacaagtgttgggcattaattgcttattcagatcaatctcactggtctccgtagtgacatgcatattttatgatacaagtcaagctgctagattaacagatgtttgtctttaaaggaaaggaaaagtgaaacagcagtcacagcatctctgtccctgtatgcattcaatgttaaatgctacatttagagaacaaattaataggtgtattatctctgaattatcatcaccccaagcactgtcctctgtcagtaagttattttcagcattcaggtagtctttgccactaaatctttaacatctgagaaacccaaagccatgtaaaagaacctggtcrttcttttggttgttttgttgttgttgttgttgttktttttgcattaagcattcctcatgtatgggaaactatgataattcagaatgaaaaacgtgggagaaatacctttawaatgttatcagctacataaagcctgacatttaagaaaactattatgctctactgaaaacaatgtgggaagcataagctctatggaaaaaaaaaaaaaagattaattacagccttgaactttctccacttggccaaaaggagaataagagaatgtgaagtgtgaaagctcttttgacgtggtgactggaagggctgctgttgcaatggacagtctgaatcacagaccgcaaatgaaggaagcaaattcagaatatcagggaagtggaggaaagtagaagagaagaaccaggagactggatggaagcagagctagctccgaaatgagaactaccttgtctggaaaaaagaaggcttactgatagtcaagcagcataattaaggatcagtgaagcttacaacgttgagaatagtaactgacttctttgactagagagcagcctgaattggaggggactgtactgtgggaccctgtgaggtatgaaagtggatatcccaaggctgcctttctgatgtctccagagagagactgtagaattactttgatgtgatacactattggtaaaagccaagaccacatctgcctgagaaaagaaaatggtggaaatgagggaatagaaacattccattttcaaacgtgtagttaagatgtttgcaaattcttgtcccaaacgccaggaaagaaagtggatgaatcaatggctactgcaagaatagtttctgtgccttgctaatagggaagaaggaagtatcattatctgggccactgaggctgcctgaaacaggagaaatgctggattacataagttaaatacagaaaagtgacagaaggatgtagtgaggaggagaagatgactgcagaaaaaaggaagatggaggaaatgaatacaattttagcttttcatagaaactgatagtgtgattaataggaaatttgtgaaaatttgggaggttaaataattgcaaattattttatgcataatatgacaccacagtgtctctaaaatttgttttttaaggctgggcacgatggctcatgcctgtaatctcagtactttgggacgctgagacagacagattgcttgagcccaggagttcaagaccagtctgggcaacatggtgaaaccccatctctacaaaaaatacaagaatcagctggatgtggtggtgaatgcctgtagttccagatacttgggaggctaaggtgggaggttcacttgagcccaagaggtggaggctgcagtgagccatgatctcaccactgcactccaagttgggcaacagaatgagactctgtctcaaaaagaaaaaaaaaatcttttttaaaaaaagagtataatttcatggcaggcagacttcaagcctttggtctgtccaaattcaggagtgagaagagggtctcagctggacattcaaggtctattttaaccctgtaattctgtgatttggtgaaggatcaccagttatgaaggataattagccattcagtaagagayctgcagaatattaagaaattcattctgttcatttctgacattcctacccaggtaaaatcagttatgtttagtttctttaaaaagccacataagcacagttctaatggtgtgaaatccctgtaccaggcattcatctataattatttataattgcattatttgtcatggtttacaaaacacagatgcaaaagtttttactagagcacatatttcactaygtgaaaattatttccctagactactgcatatatgttggatggcctcattactcagtatcagtaaacagttaactgataaaaatgttattctggacactcaggtgagaggggagaagcccattttagctcagagttgatgatgctaacaacttactcttacacaaaaggacaagcccagaycacttgtaatgagtgaatgaaaaaaaggcaataggaataaacatggaaccagggagatcatcaaaatcaccaatctgttttaaaaagtagaaaggattttatttcaactttggaagaacataggaaataaaagcaaacacaaaatgtttaaaagttcttaaataatatttttgttcaacttaatttacatctttttatgtatataatactatatgtagaatagcatgatttttttatgtttaaagatgaaggagctctaaaaaagctaaagtaacaaagaaaggcagaggcaccttaataagaatacttaaaatgtttgtgtacaatcactttggaagaacaatagattatttgtgtctgtgtattttaaggaagctgtagaaagatttggttagccattatttatttacttgaaacctgtattgctgtcaaaattattatcaaaataatccacggacaaactttgtcttgggttagatctcctggcagcagaccctctgacaaggtctgttgagggagttctctcagaagacacctgtcattgagcgaagggaaaagcagaagggaggaaaaggagtcagacacaaataaatgggttcaggagaagtccagcctcagcctggttgcaygggcaggtaggatgattatggaaacagccccaggggttgagtcctgctcccagacagcacccattagctaagagcagtcctctagagaagggtgcagaagtgagctcttagctcttagctgccaacactcacagcagctgaggcataggcacatcaccctggtatacatttatttgtctgtctcagtactttatgcaaaaaaaaaaatatatatatatatacacacacatatatatrtatatatatacatatatacatatatgtgtgtgtgtatatatatacacacatgtgtgtgtgtgtgtgtgtgtgtgtgtgtatatatatatatatatatatatatatatatatatatatatatatatatatatatctcctcaggctgttgttgcagtatctatccatcccaagtgttcaattaatagctaatgggtgaatgaacagatggataggtgctacaaaaaaaagacactgaagaaccagattctaagaaataaatcataataataaccagcatctagaaaacatttcccatgtgcagacacactgcttggattattttcatcaggtaggaattgttattatcttgattttatgcctgcagaaactgagatggatgttttccagagccacatggctggtgtgacatcagagctgacacatttaacttcttcgttacaccaaatgctcagaaattaggaaggtgaaataaatggggtgaaacaaatattgataactacttatcctgagtcatttatagcttcatagagtggctttgttttccttttaraagatagaattaacagctgcattttcctcgttctacaacaaatggacaggtaygtagactccaacatactccttgaataaaaatgagaaattctagaatccttggatcatgcagagtacttgaaacatccagaagattctcagtatttttgtctccgctatattacagattaaccattgactgtgaagatatataattatacaatctaaattgattatgtttaggcctgcctgtagtttaaaatatactatgagtattattacaaggcatgagattaaaatggatgttaatttttcagtattcctcctaagcacaagtttccaagcccaaatctcatgaatggaatgtgaaagagcctctgatacatttgaggcctttttaatgagttgcttagctcttcttcagggtaattactgatttgttctgtgctgtatatgagataactgacttaaagtttaagccaaaatccctctgtaattcacttgacatattagagaaagaaataaaataacacattttaaacaaacactaatgttttcttaaagtgagataagtatctggctacttacaaatcattaaaaattatgtatctggattttagaaagagagaacctatattggtttctcttccgtgtgtgcccagggagttgtgttcaactctctcggctgtcattcagctgtgttaattgtgactggcaaacacagaatccaaatccgcacattcataataatagttctgactcttctgacaagaccgctaagtaggtcatgattttatgccaaaaggaaatggccttttggtggccaaaggaatgattgctgggttttttttttaatataattcatggaaatctattctgcaatctagtgttaatgtcattgttgtagtttctcattccaaattcatcactttgcccaccatgtcccattttgcccttccaaccaggacatagtagtgggatttcctttaaaatattttatttatttatktagatttatatttttgagacagggtcttgctctgtcacccaggctggagtgcggtgatgtgatcacagctcactgcagtctcgaccttctgggctcaatcagtcttccgacctcagccttccaagtagctgggactgcaggtatgccccaccacacgcagctacttatttttatttattaattaatttattttttgtacagacagggtctcactatgttgtccaggctagtaaaatcttttaaaactgaggaaagcattttgtgatactgtaactatagttattactacttcagagtaaacacatcaatctagctagttgtcagggcataatttttgtaataccttttacttcttttggaggaaaagccattgagacagcaattcatttattcacttgcagggcatctcctttaagttagtgtctgcttgattcaaaagcgattatggaaatgtgaaagctaggcacagattgggacaatttgttgctattgtggcttttcttttatcattgttataatggtatttatgaaataaatgtaaaacgggatttttaaaaagtagtgatcatgagagctaagaagttgtcagaaagatatgtaagtcattttggacttaaaagaatttatcccacctcaaatacttccagaaaacgtgattctacatagacaaccacttgccacttcccagtgtggtaattggcaacacttagatttactacatgcaaagttctgtactaataatggattttctacctttcagcattccatacccacatgacactattttctagacgaggaaagaagcttagagaatcagtaactcctccagagtcacatagctagtaaggtgtgcctgggatttgatccaggtggtctacctctccacctcatcacttcccttgagtgtgacctgtggtcaaagagaaacagtgcattattgttgatattattaagaaactgatttatcaagccagattttaaaataatgtaaatcttggccaggcacagtggctcatgcctgttcatcccagcactttgggaggttgaggtgggcctatcacttgaagtcaggagttcgagaccagcctggccaacatggtgaaaccctgtctctactaaaaatacaaaaattaactggctgtggtgacgtgtacctgtagttccagctactcgggaggctgaggcaggagaatggagtgaacccgggaggcagagcttgcagtgagctgagatcatgccactgcactccaacctgggtgagagagcgagactccatctcaaaaaaaaaaaaagaaaaagaaaaaatgtcgtaaatctgaatgtgtgctttgtgattcatgaattcttgtcagataaagagtatgtggtggggcagccacaaactcaaacaaggatcttcatgggcctggaatattgtgggctcaaattctctctctcctatgacactttctttaatcctcattcccacttactccacaaaaccttcttaatcctccttccctctctgggaccagttaatccttctttctcttttgatctcctactgtagttctctatacasctctgtgacagcccttattttgcattaatgttagggttaagtaaaagtctccctcattggattgtggactctttaaaggcaagagtcctattttactgaacaatgaactctagtgcatggcatatagtaggtgcacaacaagtttttgtaatgaattaattaatataaatggccacacagtaatgtcactttctcactcatctctaatggaagttcctacttggacagggagaggacattcttaaaaggtcaaaacataatctatattatatgatactagagaaaaacatcttttcatactatccgcaacaaatgtatgtactcaataaatattggttgagtcataatcaactgttaaaaacttccaatgagcttgcgaattcaagaatttactgggaagtttaccaaaaaattaattgtaactcacatagcttttaagagacacaggatctaagaatactcaggacaagagacctttaaatctgcactcccctcagtaattttaaaagtgaatatgagggccctcctctccctcatttgttcctgcagtgaaagaaggagatcactttgggagagttcaaacatgatattgatctcctacactgctgagagacataatggattcttttttttttaggataagaatggagctttgtttggaagaaaaggggtcctgcaaaatgtgataaactttccaaatatcctacaaagtctctttgtcattttgtaaaagtggacatactgcctttgtttttgtgtgatcaagtttgactcattctgcaaagcctgagggttgcatttaaaattggcattaattttgtttttcacaggcttagcttttttccctgaggcttctaacaaattctagttggcttctgtctctattattgaccatgtgtaccaagtggaatattgtctataaaaatttgaaggcatctgttgctttgcaaagactatgtgccttttatgccttaggtaagcttatcaattccagtcccctttaagaggaggctgaccatgcccatggttgcagaggtgaaaatataaagagaagcagatgtggcttgaggcagcagaaggctaagaggctcttcagagcctgtgctcactttgtctttgagtgaagctgcatctttgcagaacagcatctctcattgcaaatgtctttggaaggctcaagcatatttgaaaaaaataaaagaggcataactaaacaaaacataacctcaaacaaaagtgatagagaaggttgagccaggacacatataaacaggtttcgatgggatgagaagttattcgaaggcctccaaataactgtaggaagccagaaagagcatcgtctatttcttctcggataatcccaagattcttatctatatcccctgactcactcctcttcatcccctctatcagcccaactcaactactgcctgaaagatctatcaataccattcttactcaacaggatcaacattaggctatacatgattctgaacttgctgagttcatagttcattgatatgtggctaaaaaattatttttctgtatgatccacaattcagaaaataaaatrtaggtatggatggcaggtaatctctttttctacatgttgcttcctgtcaaagccaattcttctgccattttagtggaagaataagaagagtaactacccatagagttgagtcagctaaattcacataaagtcttagcatcaaaagcatttataaggatttttaaatctatttgcatattttcttcctctgcccatggaggtaaatgtcaattccattattrtaaatctgatttccagtctcataattttctttgtctctcctgcttcatttatacttttcctaaaacttggggaaaaattgttcaattacacaaagagcccagtagcccagtggctattaagttgttaaacaagcccccattctgttttcattctgtaattatttcttaaatcaagcctgtcatagccatcttgctaataagttaattatcctgaaacaaagatcaatttggtgttttgggaacttggtacaaacaatattaacacaaagttatagacctgggaatagtgagtaagggaaaaaatgaggatggttgtttaaacggctctgaatttggaaatgaccctcaagctaaaaataggaaggaaaaacaaatgaatgtgggataactaggaacataggatttgttcttgcagagctgaaatagcttaatgcttaagagcacaggcattgtagtaagacagacttgagttcttatccaagatgtgttcttccctaattgtatgaccttaagtaagtacttagccctttaaattctttccttgggaaagtgttacgttgtgattgttctgggatttaactgggatgtttgcaagatgctttgcctattacctagcatatatagtaaatgcttaataaatggtaactcgtgccatgcacatgagcccacctgtcacattcctgtgtgcccatcacagcacccactcactacagacacatgcccagggatttctggtagagaatagtcagctaccaggtgttaaaatcccaagaaagccttcagataactgtaagaaaaggacatctccccttctcagaataatcccaagattttaaggcagaggcaccctcatcttcttcaaagaagttacatctttcttaccttcatttcttctcacggcacttcctctccctggtatgcccttcctttcctttcttcacctgcttagtctcacttgttcagaacctccccgagccccacattgccacacgtacccaccgcctggcccccaggacctccaagcacacctccatcacagcccttcccacaatgaagtaatgattgtcttagcagtctcttggcgcttcctccgtcatgagggcagagacgttgccgtgtttgactgaattaaattatttcccccaagtcatccttactttgagtccacttctccaacagggggaaacattagcacaatttttctagcagctactttactatccagaatgattgtccactaatccaattaaatttttttaataaacattaagcttctcactactggcaacattaaatgtgtgtattaactaaaaagaaatttgggctgggagcactgactcacatctgtaattctagtactttgggaagccaaagcaggagaatcacttgaacccaagagttcgaaaccagcctgggaaacatagtgagaccttgtctctacaaaaaatttaaacataaaaaattagccaggtatggtgccacgtgcctgtagccccagctactcaggaggctgaggcaggagcatcacttgggcccagaagttagagactgcagtaagctataatcatcccactgcactctagtctaggcaacggaacaagacggtctctaaataaataaataaataaaattaaaatctaaaatccaaatgctttttctactttattagtggtatctctcatcataatgtcctgtcttcctactgcaagatgcattccccttagttttccatcttctaagctgttctttttgattccacttgatctccattgaatcttacaataattatgaactgaccatatttggccatggtagttaacgtcaaaattgcaggagataaatttttttaaaggatgaatcacatggacttaaacaagtaataataaaaggaaagagaaggaaaaataataaaagaaaatagaatgagcctgatcttcccagggcctaaattagcccctagtcacacatctgttgctcaggcagcacagcgggtttttttcaggctttcagggtaccacttagagctctgtagcagggagacactcgagcattaaagagaatggagcctgtaattaggagaggtaccaatgtcacatgaggctgaaatttgacttctgaggctctaacgaatttctttagtttggaagctttcttggcaaagctttaaatctcaatgccactactttgtagttttgcaaagcctcaaattgctggaatgctgggaggagagaagagaaaatagaaaggggaaaagggtatgttaattaatttaattttctggttaattcagcttgacgagtatttgtctaactgctgggctcagaatgctgtaggtgcagtagagaaaaaacgagaactgcacagtgtaattcttgtctaaaacgagcatatcatttttctcattttctccctttaacgctttctttaccaagtcatttcaaagtattttagtcctcactagtggtttaataagtacagaaaagccaatatgatttaatcttgcttccatgcatctccaatgatcagtctaatacctagaacaaagtaggtgttcaatatatctatattgaattgcatcctgtaggtggtatacgagattgggtccaatctatatggatctcaagagatattctaaaagtttatttatttgacgaaatctattaatcaccctattttctgggctacagatccctttcttaagcaacttttgattgagaagcaatgcattatctagtcagtatcatcttaatgaaatcttaaatcctcttggtatttactacattggggtttatttcagctacccccaatagaagtaagtgctttctgcagcaacttaattttagaagtgttctgtcatagtacccaaagattagcgagcagaatattgggcacttgatatctgctcatgatctggacattggtcaagctaaggatgtttgctctggggctgtacctgaatctataaaatttagacaatcggccactgcagccaccctcccttcagctaaagaattgttccgaaccccgattaccaccactgacttggattcttttctcttgggcccttttctctcaaccacaacctcctgcatggcctgaaaccgagcctctcccttcttattgttagtggtctggctttgaatcgactgtctcctaattagacarccagatcaaggggctctgggaaaggagtctggaatgctttctctcagtcaaaggggatagggggccaaagccctggttgggctgtgagggaggggcagctaagctgggcccatgtgtgtgggtgctggtggctggaactctgggacagaaccagagcagcttctttaggaagtgccagaccagacatggcccatatcagaaatccattctcccatctcagagaggctcttggaaggaggctaggcccactcttcctttgattcctgagggagaccgaatagtgatgagaggagaaaaacagaatccatgctagatgacctcaatcctctcagcaaactaaaaggcagggttatttgcaaagaggtttagaaggctgctgtggggtgcaactagagtcaacaatagacaaagaggattgctgggcagtagccagtttccctgtagctttaagctaccaacccacacagacccataggagttgggaagtcatctgcctcttgcagtcractttgcctgcccttgctccttctgatttcctggccagtctgcaggaaggttcttctgccaacaaccacagccacccagcaaggtacatgcatcatgcagagaaacagaatcacctactaaggtycccaaatggggaagaagataaagaatatttcagtatattgcatctggacctggcttggcacagtttctgaggattcttgggggtccatcctaagactacttccaaaagccctgctttgttctgcaagtgcccagctaagatctgatcctgccagccttggcatctgcatctgtctgatgcagacagatgtggatttggatcctggctctgcaatgtagttacacaacctggacaagttatttaatctctttgaggctcagtttttgaatctttaaaatggagataatgttttataatgttattgtaggaatcgaataaatccatataaaatccaagtgataaattaaaattgataaaaaatgtataaagaaaacctctaatgcagtgtgtggcacatagtagttgttcagtaaatggcgttacctggtgctcctgttgttgagtgctgatgaagattccaaaaaatattctctgagctaatgtcgtaggaataatcaaagttatcttaagttaaccttctctgctaggtttctatagcagaataaatcaaagtcactattacagtgttaagcttcatgttcaaggaraagtttttcataaaacagttcataaatatcacaacaattttctctagtatctctttattgtgttgactttttccccacaaagttctctgggtgctgcctatatccagtgaaataaagattctgtacagaaggcttagaaaataagtgttttactcagatatacacagccttcaagtgttctgtactcatccctttgcawaccaatcatgtctgtttttagatctgtcttctttcatgatttgtccttctttcattctgttaaaaaaaaaaaaaaaaaaaaaaaaagtatgttccgccaagcttggttcagcagggctgtaccacaggaattctcatcaaaacatgggactgactctactttctcagagaattgttcccacccatctcactcaccacgtccacttaggtgtttctctttcaaattttgtagttaattatgaggctttagaaatatggttctgcaaagtagtctcaatggttgttactccattgctgataacttcactccaggagccatgagtttttaaagtttattactcttttagtgcaatcttcaatttttagttgaagaaaaacaaagtcactgcaaagagaacaccaatcaatcaatcttttggagggacatctccaaacatataaaagaaattttgaagggccagttatttgcatgttgaaggagcttcagtaacaaacaagaaatgccattggtggagagcctgcttaattgaaatctcttgcatgaatcaagggagaagtaaaaatttcaagaagctcatttggttcttagagaatgacacttatgggatatataacactgaaacaaaacagccaattgatttccccatcaagaaggagaggaaaaaaatgggagacagacctaagtttaatcaaaagcagaatcgcagaggaaagattgaactggtaccatcccttttcagtccatttagggtgtctcatagacataacattgctcattatgtggcaagccctatctctattgcagtttgaaaatcagagccaaaagaaaataaaaacaaaaactcatttccgccattaaaaatgcaaaccatgattatagttttctcctcagatggtgcataattctcctccctctgctataattccctttcctaatctagatatattttgtagacttttgaaagttgttactgcatttgttattcaaattaaaacatgtgttgtgaatgaactagggaatttggtgagcatttcattttgaaatttccaattgacctctctagccctcttatattaaatgacataaaacagattatgcagaccacatcctctgcaaattctgtccttaggaataagaaaaggattttcttaagattcctagacattaaataacaattacctaaaacatagcatccatctaatcacagaatttcagagctgtgagcaactttagacatcatctggtctattgtcctgcaattatatctccctggatccttttctgacccatgaaatgtaaataaatttttattcctagaaactcatcactctacctatgctaccgctgcagcactatcactcctgctaccctttgtattttgaagttaacatccaaggttcttgtagctgaaaactttttcattattattattattattattatactttaagttttagggtacatgtgcacaacgtgcaggtttgttacatatgtatacatgtgccatgctggtgcgctgcacccattaactcatcatttagcattaggtatatctcctaatgctatccctcccccctccccccaccccacaacagtccccggtgtgtgatgttccccttcctgtgtccatgtgttctcattgttcaattcccacctatgagtgagaacatgcggtgtttggttttctgtccttgcgatagtttgctgagaatgatgatttccagcttcatccatgtccctacaaaggacacgaactcatcattttttatggctgcatagtattccatggtgtatatgtgccacattttcttaatccagtctatcattgttggacatttgggttggttccaagtctttgctattgtgaatagtgccgcaataaacatacgtgtgcatgtgtctttatagcagcatgatttatagtcctttgtgtatatacccagtaatgggatggctgggtcaaatggtatttctagttctagatccctgaggaatcgccacactgtcttccacaatggttgagctagtttacagtcccaccaacactgtaaaagtgttcctatttctccacatcctctccagcacctgttgtttcctgactttttaatgattgccattctaactggtgtgagatggtatctcattgtggttttgattttcatttctctgatggccagtgatgatgagcattttttcatgtgttttttggctgcataaatgtcttcttctgagaagtgtctgttcatatccttcgcccactttttgatggggttgtttgtttttttcttgtaaatttgtttgagttcattgtagattctggatattagccctttgtcagatgagtaggttgcaaaaatgttctcccattctgtaggttgcctgttcactctgatggtagtttctttttctgtgcagaagctctttagtttaattagatcccatttgtcaattttggcttttgttgccattgcttttggtgttttagtcatgaagtccttgcccatgcctatgtcctgaatcgtattgcctaggttttcttctagggtttttatggttttaggtctaacatttaagtctttaatccatcttgaattaatttttgtataaggtgtaaggaagggatccagtttcagctttctacatatggctagccagtcttcccagcaccatttattaaatagggaatcctttccccattgcttgtttttctcaggtttgtcaaagatcagatagttgtagccatgcggcattatttctgagggctctgttctgttccactggtctatatctctgttttggtaccagtaccatgctgttttggtgactgtagccttgtagtatagtttgaagtcaggtagcgtgatgcctccagctttgttcttttggcttaggattgacttggcaatgcrggctcttttttgattccatatgaactttaaagtagctttttccaattctgtgaagaaagtcattggtagcttgatggggatggcattgaatctataaattaccttaggcagtatggccattttcatgatattgattcttcctacccatgagcatggaatgttcttccatttgttttgtatcctcttttatttcsttgagcagtggtttgtagttctccttgaagaggtccttcacatccctcgtaagttggattcctaggtattttattctctttgaagcaattgtgaatgggagttcactcatgatttggctctctgtttgtctgttattggtgtataagaatgcttgtgatttaaaacatcactatttcaatttcaaaacactgtttaaaaatcccaaagtcaagaaaacctaatgtatgtaagggcttcacaattttttcacgactgacattttatgagatgggacaaatctttgttgtgaggatggctgtcctgggtactgtaggatatttagcagcatccctggcaagtagccccctgaccccctgcaagtgtgacaaccaaaaatgtctcctgccattgccacgtttccttgggggagtggggatcgtttctgcttgttaagtatcaacatatgttgtttatgaaaaacaagtgagaaaaaaaggttgatgatctagaagccagttctcccttcaccatacacacaacctctccaacactgaatgtcatcattttgtaaaaatctttgccaattaagtggcaattatgataatattcaatcagaatgctcttcagggttcagtgccataatatttgctaaaagaattaaaagaaaagtcccatgccactctggagttgtagaagtgaaatgttgtagaaaatgaaatctgacttaattctgtggtcctgatataagagtaaattggcttcagcagcatctgcgccatcccatggctgagttgactatatgaatgttatcttcattcctcatggctctacgtttgtatgtccagagcttaagtggtcagttgaagaatccacatgtgaatagctagtacatagtagttattcaacaaatacttgttaaatgattttatgaattgtgctttatcttttcctcttgaattggacaatcagccattttagtctatgctggaaataaaaatattcttgttcaaattactcggaggatataagaccccctagaaagtctcaacgtttcttatattcctcactctacatccccaagttttaaaaaaatgtgtatgtgtttgagagagggagagatcatatgcatgtatgttacagaagcaatcaaaaatatatgggacatggtctctcagccgtagggtctcaaagagagaaatgaaagtgacaatttgtgtcaggctttatgctgggatattaaatagaccatctctgtagtcctcacaacaatcccttgaggtggatattatcaccactattgtatagatgctaagaaataagttgctcaaagtcagacagctgctacacgggagagcagaaactccagttaagcactagctgtgttttcagctgtctgaaccgggtttacaagcctcccatggctcacttggcctcatgtgcccccttggcctcggttgcttcttgaatggagagctctgtctgctactgccctgactgtcaccrcatatcctaaccttggtgatggccccagccagcctcttcaaggttgagggctggacctcatcattctcaccattgtgggatctcctgcagagccagtacctagaccccagcagaccagacttacagaggtgctggctctttcagcacttctagattcaggggctgtgctgctccctgagccctggcttcccagtggctgctcagagaggctgggcagtgyaaccaagaagtggrgggatccaactccccctaggaaaacttggagcagtgaaagacaggagactggaggaaccagcagctgaagtcccctcactccctccccctaccagactggcctgagatagagtagctccatgtagcctttctggagaccatgttgccggctgtgtttattaatgaagctggggtgcagctcataacattgccctccttctttgccttactccccttttccacttcacgcttaatgcccacacacttaaaatgttaacttggaagttttgccttagtttccattttctagggaaccctggctaaaacataaatctttaatttataaaatgacagtgctgctgcccatccctcaaaagttcaaggaaaaatagaaacaaaacccctgttagtagatattgccccagactgatgataactaacagatatctgaaaagaaaaacagccagcatatgtagatgtgaaaagcagtgcattgagatggcactcactgtacctttgtggccaccttgtatctgccctaaactaccagttttcaagacactggacatcaagcaatgaagtggtccctggtagaagggaaacaaatgcagtgagccctgtgattgcttcagagcctggagatgtttccaggccacggtgcaggaaaaaggaaaccctttggaggctggtggactccatgagttgaggagatggaactgagagtccaagaaatcaaggtggctagagttgcaggacaaaagtatcagagatgagagagatacacagttractctggaaatatgcagagggcctaatcagatattcagtggccaccttgtatctgtcctaatgatatcctgttttttcccccttgcttttagacagaagggctgtgtcaacacttactggagtagaatggctgcctttgtcttactataatgaycatatgccacctggtaagatggaaagtgtcagtcatcccaagttcaaatcttagctcttctgcatgcacatgaggaaattgcctgatgctgaggaaaaaaaaaaaacatacaaaaggattagagaaaacagtacctggtgctcacaccaggcttggaatagtgccagtgtccttcaggcagactggaaaacttcataattcacaaaacatggggagaggctttgctcaacagtggggaataattagccctaaacactgctctgatccaacctaacaaatcttaaaagcaagacctgaaagatgaaactgtttccaagtaactaaactgcattccagaacaaagctcaagaatatttatagaaatacaaaaatatccagcatccaacaaggtcaaattgtcaatgtctggcatccagtaaaaaattaccaggcatgcaaagaaacaggaaaatataccccataatgaggtaaaaaaaaaaaaaaaatcaactgaaactgactcagaactgacacaaatgttacaattaacagagaaagacattaaaagtaactgtaattttatttcagatgttcaaaagcttaaatggagacatggaaaatttttttaaaaggctcaaatcagacatttagagttgaaaactacaatgtctgagatgacagatatccaggatgggcttaatatatccacacaatggaatactaatgaataatgaaaaggaatgaactaaggatataacaacattgatgaatctcagaataatagtactgagtgaaagaacccagacaaaaatagttgcatacggtattattcattttatgtaaaaatctagaaaatgtaaaataatctgtggttacagaaagcagataaatggttacctggggagaggagaaggaaaagggattccaaaggggcatgaggagtctttggggggtgatgggtatgttaactatttttatttttatgatggtttcacgggtgtagacatatatcaaaacttataatttgtttttttaaatataatttcaatttttattttgatttggggtacatgtgcagatttgctacctgggtatgttgcatgctgctgaggtttagagtatgattgacgccatcacccgggtagtgaacacagtacccaatagatagtttttcaaactttgtcccccaccttccctcccctctctagtagtccccagagtctgttgttcccatctttatctccctgcataaccagtgtttagcttccacttataagtgagaacatgtggtatttggttttctgttcctttgctaattcacttagcataatggcttccagatgcttccatgttgctgcaaaggacatgatttcattcttttttatggctgtgtcttattccatgatgtatatgtaccacattttctttatccagtccaccattgttggggacccaggttaattccatgtctttgctattgtgaatagtgctgtaatgaacatatgagtgcatttgtctttttagtagaatgatttattttctttggatatatacccagtaatggaattcctgggtcaaatggtcaaagaacctgttttaagtkctttgagaaatctccaaactgcattccacagtggctgaactaatttgtattcccaccaatagtaaaaacatttccttttctctgcagcctctgcagcatccatctttttttgtctctttaataatagccttmtgactggtgtgaratggtatctcattgtagttttgatttgcatttctctgatgattaatgatgttgagcattttttcwtgttttttggccacttgtaagtctttttttgagaagtgtttatgtcttttgcccactttttaatagggttatttgttttttgcttgttgaattgtttaagtttcttataaattctggatattagacctttgttggatgtgtagtttrtgaatattttctctcattctgtaggttgtgtgtttrctctgttggtagtttcttttgctgtgcaaaagctctttggtttaattaggtcccacttgtcaatttttaaaacttataatctgcatactttaaatatgtgcagttcattgtgtatcacttagaactcagtaaagttatttttatttttgtttgtcatgttatctatttttttcttttttaatttttatttttggtttgggggcacatgtaaaggtttgttacataggtaaacatatgtcattggggtttgttatacatattatttcatcacccaggtattaagcccrgtatctaatagttatattttctgcttctctgcctcctcctactctccccrctcaagtaaaccccagtgtctgttgttyccttctttgtgttcataagttcttatcrtttagctcccacttacaagtaaggacatgtggtatttrgttttctgttcctgcattagttttgtaaggacaatgacctccagttccatctgtgttcccacagaagacatgacttcattcttttttatggctgcatagtattccatggtatatatgtaccacatttcctttttccaatctgtcattgatgggtatttaggttgattccatgtatttgctattgtgaataatgctgcaatgaagattcacgtgtatgtgtctttatgggagaatggtttatactccgccaggtatatrcccagtaatggggttgctgggtcaaatggtagttctgcttttactcttcgaggaattgccgtactgctttccacaatggtcaaactaatttacactcccaccaacacaacctcactaccatctgttattttttcactttttaataatagtcattctgattgctatgagatggtatctcattggggctttgatttgcatttctctaatgatcagtgatattgagcttttttttcatatgcttgatggctgcatgtatgtcttcttttgagacatgtctgttcatgtcctttgcccaatttttaatggaggtatttgttttactcttgtaaatttgtttaagttctttgtaagatgctggatagtagacctttgtcagatgcatagtttgcaaatattttctcccattctgtaggttgtctgtttactctgctggtagtttctttagcagtgcagaagctctcaagtttaattagatcccacttgtcaatttttgctgttgttgctattgcttttcatatctttgtcatgaaatctttgcccattcctgtgtccaggatggtattgcctaggttgtcttctaggaattttatagttttgggttttacatctaagactttaatctatcttaagttcattttcatatatggtgtaaggaaggggttcagcttcaatcttctgcatacggctagccagttatcccagcactatttattgaatagggagtcttttctgcattacttgtttttgtcatagtaaagctatttttaaaaactaaagggacaaaaatgtgttaacaaaccactgaaaaactcagaaaatagagaattcataaatataactatgtcattttaaaatatttaaaattttgtaaattttagagaattataaaataaatatttaaatctataatttttgttatatctaaatccatagaatccacagaccacatctataatattgtatctagtatagtatctgaaatttggtttggaggttttgttgttgttgttgttgtttttggagacagagtctcagtctgtcccccaggctggagtacagcagcgccatcttggctcactacaacctctgcctcccgggttcaagtgattctcgtgcctcagcctccctagtagctgggactacaggcacatgccaccatgcctggctaatttttttgtatttttagtagagacggggttttgccgtgttggccaggctggtctcaaactcctggcctcaagcaacctgcccacctcggcctcccaaagtgctaggattacaggagtgagccactgcacccagcctctttgttttgtttttgtttttgtttttaacaataagtttagaacatctactgtttagaactatatattttcatgtttttcaaattagaaaaatgaagtcagaaagccacaagataaatttcagttagtttttccaaaygtgctccataaattaagaaaatattacacttttttttaaccataagtgactgtacatttattccctaatactcttctctgttcgataggaggtctgggcttaaaaccctctaaatgtctgattaaagactcaaatgctttaattcctgttgttctgcttcattagagatacagttgtgtgatggatgctcattatatttttgaattaactaatttgtgtattctcacattccaaacttgtctgtcctgatttcccccagtttgatgccgaccgcgatgaggatgaggtgttctatgacatcagcatggcagttgacaacaagttatttccaaacaaagaggctgcagcaggtaagtcactgtgtcctttagacaacagtacrccgtgatcacctgccaaatgtctggggctttgtattaatggttgaagttcaacaaactgctgcaagttttgaaggatgacaaagtcttatactttctggtataaaaayaaaagtataaaacaaagtagagaggaaaggctataaatctgttccttatagttgctgcttttcttccagtcattgcacatgtaaattaccaggtagtcacaatgtaacatagggcctatgttactataatagaaaaatatctaacctaacccatactttgtacaattaaaatttacaatatctccaggaccccctaactcatacgataggtttctacctcattgcctggataaaagcatcccctccaatctggtagccactcccatcccaacccacagctcctgtgtgaccctacctcttctcttcctaagtgctcttgcctggaattttgactttggactctgatgtagagtaatcatacctcctaatgtaggcagtactcatggttctgtcctgacccccctctcattctctccgtactctgaccctgagccaactcattgtcacaggtggcttcaacatcaattctatgtggatgactctccaatcttagtctcagtcctgaccttctttcttctgagtaatgatctcaaagggtaaagaccaaaagcttggggccacaaagaaaaaaggctaaacacttaacattttaaatcactatttgaagccacctaagagtagcttcaaagaaagacagaattacaagggtaaggtggtagtctttctgggcagacccacagaacacagataaccgatgtaaactcatctgcctaactttctgatgagatttataaaaagttggcctattgcaagaaagatgaaatattgagaatcatttaagattatgaaaacatgactactgctgctctgaaaaatactatgactctgtgcttttcaagttaatattttatttagaagatgctttagaagtgactacctctaacgacaaatatctaactgctagatatcctcagtttgctaatacagtgggatggaggggctgatttaagccaccccttctttgggacacccagcacttcgtggctccctagcggtgtttctccactagggagccttgtgccctgcagtgatgcaactgtgctggtttctgtaccaataggaaaccgcctgaggacacgtgctgtgtcctcattctcttaaggtccccttggtaaagtgcatagtgcctgagccttaacagcagtttccaggtgtctactttctcctctctgtacctcagagctcataaacagaagactctgtgcttgcagcctcaactcccgctaactcttccactcctgagaccccctgaaagctggcttctgcttcagccttagaataagtttgttttctctaaaacagccctaggtgaataaagtgcagtaaactagaagtaaatggtgcctcccctgcaggaggcagatactgtgtagctccaggaaactgtcgctgttaaggaacaatggtgaaatctcctggcttataaatgttgatgactcacccaataaataagtcatatccatggcctctgctctatgaattgtcagcctccaggtttggtcccgccactgtttttttctctctcaactctctttctgcagaatctcagctgccccacagctcccatatcgcctcctatgaatggcatccaattctctttctctcaccttgacctttctccggggagccaggcagaagtgttcttgccctcacactccacactgatcatcaatccacgggggcaccttgggagtccaaacctttgtctttattcccactgcagtcaccaaacgctttgtcattcctcatccctggcctctcctgtctgtcatgaatgtcctgctgccatggagatcttcacagaatgcagctctaatcatcctgcctttctgaaaaaaaaacaaaacaaaaccttcaatgactcctgcaggctggccacgagtacccttagcacagaagaaagccccaaatcctttgctttcctgcagtggtcctgttactgccataacatcccctccccaacgtcactggcaccagcttcccccagttctctgaatacctcaagttccttcctgccttaggcattttccacctgctcttctctctgcttagaaaatgcctctcctcatttgcatccctctcactctcccaaccccatagagccccatcctgcacctggccagattctactttgcgcctcagagtaaacgtggtgattttctcaaggagactttctcagaccccaccccagactagattaggcccttgaatagcaccctgtgacccacaggtgtaccaggacttttcttagagactaccattgctctgatcgtctgcttcttcaaggcctgtctacagtgtctccccctcaatgaagccctccacccacacttctagcaaagccatctggctgcgtcactcaactgctctgggcctccatctccttatctataaagaggggataataatagcagctaccccagaggattgttctgaaaaataaatggtttctgtatgcaaagtatgtggttgtcacattgaaaaggctatctatgggttcctgtctttgcagcagatttgagggctcatggggagaaaccacatcttacacaatacaactttctccacttttcctggatctacttcttctctcttctccttctctgccctcctccctgccccaaccctgtcctggagtaactgaaaaactccccacttccccttctcacccagagcaacccatcaacacccagatccctcaaagagttctagtcccaaataccgtcagaatatttttccaagtaaatacagtgctcttcctacacattgtaatgaacactttccatgcctgtggaattcgagctggcctctcagtgcttaatgcaggtcaggcacttataggagacatttaatgtttgtagcatggatcaatgagagcaagacctgtacaggtaaagtggaagtgtcctttcatttttagtcatttggtacgtatgcattgaacacatgtaccttctaagttttgttcttagattcagaaatgaaacacaacccttacaggtttaattttcgttaaaattaaactgtaacgaaactgttaatgaaaataaaactgtaagctacgctgtaagggacaggacaagggagaaactgctttcctcagagggtgcagtttaagggttggaggagttttatttacggacacccttcactgcttaagaagccctgcaattgtaggagtgtctttatggggtactcaaagtgggaggaggattttcctaaaactttgagttaaagatccactaggaggaaaaacatctgtaacgttgacccagaaagtaatatggttagtctctggtacctctaaagctaatttgtatcaccttcccccttaaatttaaggagccaacctgaaaataatatttctgaaggccattctaaaactagcagcactgggtgcttcctctagggttctgtatttcagcgcatacctttctctgtcatctatagaaataatatttttaaatctggaragaaattgaaaaattcaaaacggggaaaatgaaagctacactatcactttttcgtaacatcctaatttwtctgtcttttttgagtaacaatatcattgcagttgttttatgtgttaaattatccaacgaaagaaggcagtaatgtgtacatttgtctatattttccctctattttttgtgtcaaaccttagagtattattaaaggtcccattttcagcaaaccaagaaaccaatgctaaaagaaaatgaaagccattcaatcattatccaagctgataatgatatcctttgtctgttgcctcctatgatatattaatcctgttgccaggagtaacaatgtttcaagaaatttcatccctaatgatacaatataattcctgttgaaagcatcttattgcaacagagggagactctgtcaaaaaaaaacaacatacattttattaggaaatccaatctcttcttacttataagcatgaagctttcttttaaacaaaggtattttcattctaccattgctgatgatagttttctaattatcttgctccgttttcaagtattaaygtgtaatatccgttaactgagttgtttaagagcctttcacattgtcgtttttgaaaacaacggaaagaacactttgtaattaaataaaataagtaggacacgggtactaaaagcagctatatgtttaaaaagatttcatgttcagatcacagtactcactccacatgaatcactctaagtacaggtgaagcaaaggtatcatttgaatccaatagctatcaccacttccaccagtcagtggcagataataatcatattgtggaagtaaagaaagccagataaaatttgtgttatctttaatgatgctttcaatagcagccacctagaagggagcattgattgttaccagcttgaatgagactccttaattccacttctgattcttccatttccacagccaccctatgacctgcgtcatcatcaaccattcactgttcctcattttctcagcacatggacttgacagcatgctcctccaggtcctttcctgcagagcactgtagcgaaagagggtctgtataaacccatttcgattgcccttgcttagaatttggagtcagcatggtgtgttataaagagaagtaggagctactggctctgcctttggtctcaggcactttctacatgacctaggccaagttttttaacttctctgcatctcattttcctcttttctaaaatgagaagtgggattctgtgaaacagacgttgaaagtagtggcaaaaaccacaatttcttttgcaccaacctgatagttctaaaatgtctattatcttataatgggaaaaatacatatatagattttttttttatttctgatacttactgcctcacaacrtaagtgcaaactgaccttcaaactgggctttacgacggctgagtattttggccccaaaatacaccttacaaaattatttatttgaaaaaaataccaaaagtacaaaggtagaaaaattatgtataatcccactaatgttaaaatacatatgtaaattaaagtttcccacctctaccttctaatctctgttaatagtatggtgggtagtcttgccaactccattctagcagccatcttatgaacagtggtctggcaagggctgtgctgacagcatgactagcatcacccagggttgttctgaacacacttatgcaactgcaactcttcatggcaacgctatgattacttttccaaaatggtttgatggtttagtatgtccattttgaaaaactttatcatcctgtaaaaaatgtaaagatataaacacagtaaacactggcattactgcttagaacttaatcaatttggtaatggctattactttgtcaagttggtagacagcagggacaatgataagagaagagaagggggaaaaaagagaagagatgagagaagactgtgtaaggacataccccgactcatttggaaagaaaatatgaaagcaacatcggggacaggtctatatctgagaagtgtatgagatgcttaacattttttacaaatttatattcattatgcattactcattggatattctgactaagaatgatttgccaaggccaagtttacagtgaaacaatgttttttcacaggatatataatattttatgggcagcactgaattcagtctttctgggtagttagatgatatatatttcctagcaggaaagagttattaaatgagaatgatgaatcagttgtgcttcagaagtcccattgtaaaaattaccagtttaagtctgagccttggggattaatgggtaactgatttaatgaaacctgtagtacctaagggaaataatctctctattcatacattaagttaacccgatttttcttaccttcagcaactaaggtgacccgaaggcttgaggaaaaactcgagttttcagggagtacgcaaacttagcccttcctgtttctggaaaccccttactctcctcccactctgtactttgctcatggtgttccttctacttccattattgttgcaaatcctgaaactgctccccctcctggacaacctgtattcaccctcaaaattcaggatcatagattagtacctcatgaagaatcttaactccaccatcacctctactactaatcagaattagtagctcactctcttgggttgctgaacctttaataataactcttgttgacaaattattcttcctcacagtattttcttcttcttaaggatgcagacagtgtccagagtctctgcattttgaatctccagcaaaacattgtacctggcagatgagaacagtctagaaatgtttgtgaatttaatgtgatayaggaaaatatggaaacctagtgagagactgtttgctttagaaacatacatagacaacctccatccacttatcttttctttcctaatcttaggttcaagtgaccttgatccttcgatgatattggacactggagagatcattgatacaggatctgattatgaagatcaggtaattaaaatytgaaaatagttctctatttaaatgtttttaagttgaacctttgtaaatgttttatgaaaatttgaattataaaaactcattttgtgaaatatatacagataactaataacatattacatgataaattacagtagtctacagttttcattcactaagtttggctttttggcactcccttgtcctaagattcaaaacacagtgaattaaagaaaggtttatcatcaaacgttaacatgggatagaaatgaggttctcttgcccaagaatttgcctgtgtctctatcccttcccactaataaactaataatatttactgagcatcagctacaggttcagggctctgctattttatcgctaactgtattagtccattttcaagctgctgataaagacatacccaagactgggcaatttataaaagaaagaggtttaatggagaactcacagtttcacatgactggggagacctcacaatcatggcagaagacaaggaggagcaagtcacatcttacatggatggcagcaggcaaagggagaacttgtccagggaaactcctgattttaaaaccatcggatcttgtgagacccattcactatcacaacagcacagaaaagacccgcccctgtgattcagtcatctcccactggctccctctcacaacatgtgggaattatgggagctacaagatgagatttgggtggggacacagagccaaaacatatcactagtctgtggaagggaatgatgaacgaggaaagcatagccaagaagttaaatacattttctctttgaataaaactgaagacatttatctgggtcattttcctctcagcagaagaactctctctgctgctatattttaatgaaccaaaatagttggcaaatgagccaaccccctaattaggctttatttttaaaaaagaaaaatgtccaaaactttcttccgcctctcatcagtgctcctcagcaatggctaaaagccaagtgaacatgttcttgggggaggctttgttcccatctttaactaatattcatcacaaataaagcaaacagatcwgrccagtgtccatgtgtaatggctggctgtatatttcatatacrtattcaggagctattttcttgagtataaagttctttccttatagcacaaagcaaggagatgatgttggcaagtgctataatagctacacatgtttatagtaatttttaacatctattaagcacttattacatgcaaaacgttgtgccgagtttcttatattaactcagcaattcttcacaacatctctaggaagtaaraattattatctctatatcacagacaaaaaaaaaaggactagaagagtaatttacccaaggttacataaatagtttcacaataaggatgtgaacttagggcacawtctctagcatacccaagactgggcaatttacaaaagaaagaggttgtgctgcctctgccacaatgtactgcctcccatcctaacctccaaagacaggtcattcaatgatatgtattgggagccttttcagttgctgacccataagactccagcagaggctaatgcaaaacaaccacttacaatctaaaattacagactgcacaaagaaatgattcacaacaaggaagccagctagttaaagaaatggaagactccacaccccccaagaactagaaagaacagaaaaatctgaaagaaatcataatataaggatattcaaaatattgaaagggaagattaraagccatgaaacaaatacatgaacaaatggaaaagaagaatgaaaaagggaagaaacaggcattgtaggcacacacaaaaatatcgtcaattgaaacagaaattcaattaacggttgaatagtagactagatgcagctaaaaaggcacttgatagagcagaggaaattgccatagaataaaacacagagctaaatagttgtcaaatatgagaagaacttaggagacattgaggatagaatgattggttcaacatattctaaaaggaattccagaaagagagaatggaggtgatggagccgaggttattttttaacagttaatagttgagaattttacagttattttttaacagataatagttgagaattttacagagatgaataagacaagtcccagtcccaagatggaaggaacatatccagtcctgagcaggatttttttttaatcctcatctactcttttttcatttaatcattcaacaagtattaattggacaccgactgtgtgccagtttctgtttaggcacttagaatataattacataaaagaagcaagggctcttgtggcaagaagcttacatcagagtgcagaagacagaaagtaaacaataaacatagtaaattagtcagttttctagattgtcagaggtgataaactctatgagaaaagaaagtagaaaaggtaagggggttaggaatgctgggggaggaacagattaccacattaatcaggatggtccatattaaatggtatgccctcattaaagaggtgagatttgagcagtgacttaaaatataatgtaaaccagcagaagatggaagagaaaactaaaatattaaaagtgaaaatatagtgttacagctcttttagaatttgtctagcaggctttctagtttttgctggaaagcccagaaaaaaaaattcttttaaaaaattaaaaagtgaaaatgcagttactataaaggaatgacaattttgtttgcagcagattaaatgaaacaagaacttgcatttatttagcacctactctaaaccaggaatgtgttttatggtttacatgcattattgctgatccttacaataactcaagaagtaagctctgttaatccctaatttgaagccaaggaaattgaagctcacaaaagttaactgacttcccaagaccataaagctagcaagytgtagagtcagaaatcaaactttgatttgcctggcaccaaaatctattctccactttccccactccaataaagccattaacaagctcactagtaatcttttgccaattccagttaaccctttttagttatctttcttgacctttgctgcatttgacaccrtaaactagggatcaccacactttttctgtaaaggaccaggcagtgtaaatattttaggctttgtgggcccrtatgttawctgttgcaactactcaaactctgccatcattgagcaaaacagccataacaatatgtaaacaatgaatgtggctttgttgcagtaaaacatcatatgtggatactgaaattcaaattccatataattttcatgtcatttatttccaccatttaaaaatgtaaaattcattcttgctgaaaggccatataaaaataggcagcagagtggatttgacctgcaggccatagtttgctgactcctgtcgtgaaccattcccccattcctgacattctttccattagctttcaacatttctagagcttttaatacttgtcggtgtgcttcatatttattacctcattttatcctcagacaactatattattattatcccaattttcctgatgagggatctgaggcacagagaaattaagaagtttactcaaggtcacatggttggcaagaggtaaagccaggattcaaaaggtagagctaggattcaaatccagctgtgtgactccagagccaggcgcaggaaagataggctaggttatgctggtataattaataaaactcaaaatctgagagctttccttccagagttccttttacatgtgatctccaaagggattatggatgggaaggagaagaacttgaggaagatgcacctgcatttaattgcacattacctcatctcacattcagtagcaaccctagtcactggctctacctagatgcaaggaggctgagaaatggagcttatttatatgcccaggaagggagagatgggtttgttgagcaccaagccagtctcagccacaaagcttctgctcctaaccacaggctgcagcacctgcctccatgtgatccctccctcttacttctcgcttcactcattcttggtttccttgctgaactcctctccatcagtctattatttaactgtgaacactccccagcatactgaccatggccccttctctcctaactgcacatgttctcctgtgagaggctcagtcacagccatggttttgacttcacttaaggcttcctggtgagctcctgttgcatatgtctgactactaagtaacaccagttggatttcccatgtgcatcttgaattcaacatgtccaaaaccacgctcaccatcttcccccacaaaatctgttcttccttctgttcttcctatttctgtgaatgataccaccattctccagctgcccaagccagacacaagggcgtcttcctagcctccttcctttctctctcttcctacrtcagtttgatcaagaagctactcagwtctcctgtgcaggaattgcttctcccactccactgcccatgctttggttcacaccctcagccttcctccctgggaccatagggccagcctcctaaccagtctccttccctcagtctgctcacccatcaaattatcttcctgaaagcacacacaatcatggcattccatggcttaaaacttttcttggctcttcatcgatttcagaattaaactggaagctcttagaagattcatagaaactttcaaatctgaatatgacccctacatttttctccaaactcatccattgccacttatcaaaacacactgactgctccagccacacaaagccattstcaggtccctcaaatgggtcatgtttgcacagtccctttcctctatatggaagtttcctcaaccctattgcttctgtcccgtgtgacctctactcatgcaccatcaggaccaagcttcccctctaggaaacccttctcttgtcacaggtttggttcaccttctcagggggcccgtgatactctgtgttgtaatattatcttgcatttcaggtactatgttctgctctctgtatccccagtgcctgccacggagcctggcatatggcatatgctcaataaatgcccatttgtttaaagccaagaacatgaattccagttcttctacttaatgtgtgatgtttttatgccttactgagccccttttgggcctcaattttcccttcgagaaaatggtggtgacaaccccacttagaagtactgttggctgggtgcggtggctcacgcctgtaatcccagcactttgggaggccaaggtgggtggatcacgaggtcaggagattgagaccatcctggctaacatggtgaaaccttgtctctactaaaaatacaaaaacaaaaaattagccgggcgtggtggtgggcacctgtagtcccagctacttgggaggctgaggcaggagaatggcrtgaacccgggaggtggagcttacagtgggccaagatagcaccactgcactcctgcctgggcaacagagcaagactccgtctaaaaaaaaaaaaaaaaaamaaagaagaactactgttgtcagaggtagggagtgcagggtaccttgtacagaacaaatgctgcataaatgtgagttccctaccttccctctttcaaatatgactgaacttttcaagatagccttctatagctgacagaggccaccwcttcttcaactaagtgaatgccagttgtctgagcacttctgattcctggactggcatgtgaggcacttagaagttgctgctctatcctaacaaccagtaaaaagctgaacaactgaaaataaacaatcactcttagatctgtcagagaagtgaggttacaggacaaacccttaccccaaagattggagagacaatcagagaatcacaacttacccaaacagaaaccctcaagcagaaacgtctgtagaagcctgtaccagggctggaaacactgaacagtgataatagctggaggttcagtgtggacaatatgagagttaaaaatcccagagagatccagtcatgggaccccacacttctgtaagttttacctccaggagctttgccaggtcctcacagtgaatatctggaaaaattcccctcagtcttctggccrtgggaggagaaaaaaaaaacactttgaaatatgctaaagcattctgctccttaacaaggcctgccctcagaagaaactactttaccagggcataacattcctagagcaagagaaaacccaactctagccacctctagccatcctgtcccacccaaagggagaaaagtatcgaaaaacactggcagagttcacagtccagggccacaggctcaccaaaagactgagacctaattataggactgtagaacaattccccggccccatactttatcacagcattactaaagattatttactgtggttccttttattcagtatatcaggtccatctgtcaaggaaaaattacaaggtatgtcaaaaggcaaaaaacatgatttgaatagactaagcatcagaaccagtcatatatagcaggaatgtgggtcatcagaccaggaacattttattttattttttagagacagacttttgctgtgttgcccaggttgaagtgcagtggcatgatcatagctcacygcagccttgagctcctcagctcaagcaatcctcttgcctcagcctcttgagtagctaggactacagatgtacaccaccatgcctggctaattttattttttgtgtagatgagtcatgctgtgttgcccaggctgggaattttttaaaactatgattaatatgccaaggactttaatgataataartagacaacatgcaagaacaaatggataatgtaagcagagaaggaaattctaacacagaagcaaaaagaaattctagagatcaaaaacactgtaatagaggtgaagaatgcctttgatgggtacatttaatagactgcacatggctggggagagaatctctgagcttgagtatatgacaatagaaactttcaaggctgaaaaacaaagggaaagrctgaaaaaacagaactgaatatctgagaaacataggacagctacaaaagatgtaacatatgcataatgggaataccagaaggaaaagaaagagagtaatgaacagaagcaatatttgaagcaacattaactgagaatttcccctagattaatgaacaacaccaaaccacagatccaggaatctcagaaaatatcaagcaagataaacgccccaaaacaaaaggcctttatatwcaaacttcagaaaatcaaaaatagagaaacaaatcttgaaagaagccagattttaaaaatgccttacctgtagtagagcraagatcaaaatcatttttactttcttttcagaaactttgcatgcaggaagaaaatggagtaaaatatttaaagtgttgaaagaggggaataaagcaccaacctagaattctgtactcgacaaaattatccttcaaaaatgaaggagaaatagagactttctgagatcaacaaaaattgggggaatttgttgccagcagacctgcctggcaagaaatgttaaaagaacttctttaaagaagaaaaaatgacatagrgccaggcatggtggctcacgcctgtaatcccagcactttgggaggccaaggcaggtggattgcttgaggtcaggagtttgagaccagcttggccaacatggtgaaaccccatctctactaaaaatccaaaaaattggccgggtatggtggcacacgcctgtagtcccagctactcaggaggctgaggcaggagaattgcttgaaaccaggaggcggaggttgcagtgagccaagatcatgccactgcactccggcctgggtgatagagcaagactctgtctcaaaaaaaagaaaagaaaagaaaaatgacgtagttcagaaactcaaatctatgtaaagaaaggaagagcatgagagaatgaataagtgaagataaaataaagaaatttttcttattcttaattgatctaacagatgagtatgttcaaaataatagcaacaatatatttaattatatatacttatgattctgtatacatgtttatgtgtaagtgaaataaatgagagcaatgatacaaagaacagaaaggaggaattaggaatgttttgttattacaaggtacttgcactacccatgaagcagtagagtgttatttgaaagtggacttgaaatagttgcaaatgtttattgcaaatttcaggacaaccaatttaaaaagtgagaaaagaagtatatgtggtatgctcataaaggagagaaaaagactcataatgctcaaataaaactacaaaaggcagaaaaagtttgccagacaaaaataggaacaaagaacaaaagcaacaaataggaaacagtaacaaatatggtatatattaatccaagtatatcaataatcactttaaatttcagtgatctaagcacacctatcaaatgacagagattgtcagagtggatcaaaaatcaagaccccactatatgttgtctacaagaaacccacttttaagtataaagacacatatagattaaaagtaaatagagaaagctctaccacgctaacgctaatcaaaagaaagcaggagttgctatattaatttcagacagagcagaatttagaggaaggaaagttatcagagattttttraagcattacataatgataaagaggttaattctccaagaggacataataattcttaatgtgtatgtgcctaacaactaagcatcaaaacacgtaaggcaaaaactagtagaatagcaaggagaaataagtgaattcactattatagctggagacttcaacactcctctatcagaaatggacagatccaaccagaagaaaatcartaaggttgtagttgaactcaataataccaccaaacaccaccagtcaactggatataactggcatctatagactgctttatccaacaacaacagaatacacattcttctcaagctcacatggaatattcaccaagactacattctgggtcataaaacataccttaacaagtttaaaagaatataaatcatacagtgtctgctctcagaacacagtcaaattaaactagtattcaataacagaaagatagaaaatcctcaaatacctggtgattaaacagcacatttctaaataacacttgggtcaaataaaaaacctcaagagaaatgttaaaatattttgaactaaatgaaaatgaaaatttaacaaaatttgtgagatgcaccaaaagcagtgataatggggaaatttatacaattgaatggatatatttgtatatacattgaattcatatattagaacaaaagaaaaattaaaactaataaaagcctccactgtagaaaactagaaaaagaagaccaaattaagtccaaagtaagccaaagaaaaaaaactaataaaaattaaagcagaaatcaatgaaattataaataggaaatcaaaacagaaaactaacaaaaccaaaagctggatctttgaaaagatccataaaatcaatgagcctctagccaggctaaccaaggaaaaaatagagaaacacaaattattatcagaaatagaagatgggaaatcactacagatctcatggacattaaagggataataaagaaatattattaacaatgctatgcccacgaatttgatatgaaatggaccaattctttgaaagacacagccaaaactcatacaagaagaaacaaactatctgaataggtatatattattaaataaattgaatcaataactaataatctcccaaaacagaaagctctaggttcactggtgaattttaccaaacatttaaggaagaaatcataccaattctctatcagaagatagaagcagagggaatattttctaactcattctatgaaccattctctatataccaacactagacaaagacattacaaaaaaagaaaactgcagaccagtatctttataagtgcagatgtgaaaatcatcaacaacatatgtaaaaagcctacagctaacatcatacttaatgatgagaaacttgaagctttcctgcttttctgctaagaaaagaaataaggcaaggatgtctcctttcaccattgcttttcagcattatacatagaagcccaagctaatgcaataagacaagaaaataaaaagcatatagattaagaaggaataaataaaagtgtccttgtycacagatgaacacataaaatgggaactcacttattaccacaaggacagaaccaagctattcatgaaggatctgcctccatgacccaaacacctctcataggccacatctccaacaggggaggtcacatttcaacatgagatgagatgggacagaacctccaaatcgtattaatgacagtggctttttagatatagcaccaaaggtataatccacaaaagaaaaagtgcataatctggactccattaaaatgtaaaacttctgctaatggtctgagcagagtgtgtagagttgctgagcccacacactaaatctgaaaatgacaccagattgacaaaggtcacaccaaggaaaatgtgtgctgttcctcttctctgtgtacttttttgttcattgaaaatacctgctcaacacagagaaaactatcacttaggttctcaaaacctgaagccacacttctgcagcttcagctatccagaggaacaaatgccccatcaataaaagtactgactttttcccataggatgaaaaaccaaaaccaaaaacactgatgaaggtgatagcccaggccttccactccattattaggcttatttgtacctttgtccattcaaccagcttcaaaggaggaggtgtgcagcttgtcttcaggtttatgctctatccaagttctttttttttttaatttttttaattatactttaagttttagggtacatgtgcacaacgtgcaggttagttacgtatgtatacatgtgccatgttggtgtgctgcgcccagtaacttgtcatttaacattaggtatatctccaaatgctacccctaccccctcccctcaccccacaacaggccccagtgtgtgatgttccccttcctgtgtccatgtgttctcattgttcaattcccacctatgagtgagaacatgcggtgtttggttttttgtccttgcgatagtttgctgagaatgatggtttccagcttcatccatgtccctacaaaggacatgaactcatcatttttatggctgcatagtattccacggtgtatatgtgccttttcttaatccagtctatcattgttggacatttgggttggttccaagtctttgctattgtgaatagtgccacaataaacatatgtgtgtgtgtgtgtctttatagctgcatgatttataatcctttgggtatatacccagtaatgggatggctgggtcaaatggtatttctagttctagatccctgaggaatcgccacactgacttccacaatggttgaactagtttacaatcccaccaacagtgtaaaagtgttcctatttctccacatcctctccagcacctgttgtttcctgactttttaatgatcgccattctaactggtgtgagatggtatctcattgtggttttgattttcatttctccaatggccagtgatgatgagcactttttcatgtgtcttttggctgcataaatgtcttcttttgagaagtgtctgttcatatcctttgcccactttttgatggggttgtttttttcttgtaaattcaatgtgccagactctatatgaggtgctggggatacattggtgggcaaaagatggcacagttyctgctatcatagagcttatagtagaactagacaagaatagaatagtcagagaaataaagttaaaactgtgaagtacttgggagaataagtgcatggtgctgtgtgtagatgtggtyggtgaggtgaggaaagtcttctccaggatggtctagatctcctgacctcgtgatccgcccgcctcggcctccaaaagtgytgggattacaggcgtgagccactgcacctggcsggcaagagattcttgaattgagatctgtaagattggtcataggtaaccaagtatgtatgagaacaggaaagaaytggggagaagagaaagggatgttcaaaaagaggaaayagcaggatgaagcaggaagaagcatggcatccaaaagaagaccaggatagctggagtgcagatgagcctggaaagtagggctttgtagagcaggttaggggttttgactttatcctaagagcaatggggaaccttgaagagttggggtttytgaggagggaggagagtgtgttgacataattatatttgtgtttattttttaaaacatttttctggctgcaatgtggaaaacacattggagraaagcaatctatggagttcaaaaaaaaaaaacaaaaaaacaaggcatctatggagtccagagtgggaggctgcagtggtccaaacaagagttgatggtgacactggagtaaaaaaggggacagagagaaagaggtgtatttgagaagaacttgtgacgaaartcaacaggacttcatgttggaatggatatgggagccaacagggggtgagctgttgaagatgacttctgggttttcaactggtacagctgggtagacagtggtggcattcactgagaaaagamgagttctgtaaagatagggcatgagtgtaattttagacatgctgagttcaaagtgccttaacatatccaagtagaaaatttcagtgagcaattaaatatataggtctggtgttcagaggaaatatctgagctggaaatacaaatttrtgagcctttttaatatagataggacttgaatttgtgagtggagatgagatagagaaagaaaacaaaattgagagaagaggctctatagctgaacaccgaggaaatttaaagtcttagtagagaaagatgaaagagcagaaagacgtagaagaagccattagagagatatgaggaaaatcagtagaatgtggtgttccaaaagccagagaaaacagtatttcaggaggcagggagtgccaaatgtggctgagaagataaggaagagagagactggaaaataatcattgwatatagaaacacggaggaaattgagaactttacaaagcgctataaagtgaagacacttaagcatgttttaactcacaggaaaggtctacttgtttgtgaaaaggagaatatacaagtataagagagaggaaagtctatctgaatgtggtaggactgggttctccagccctggtggagagactggcatgagaccaaaagagtctcgtgtgggttaagacagaaggaacattgataggataggaggatgggtttgtatatttaatggtgggaagtcaaagagttcctgtaagatgwcttccagaggcaaagccatctgttgagatttcagggtttcaagagagtagaagcctgaactgttgtgaaatctagcaggcaatgtgctaaggaaacacaacaggattaccaagcatttcatttgrtattagtgaattgagagcccatttgacattagtgactagaaatttattttgacgaatcaatcattttcatttttttcattcctttagcaaatgtttattgggtggccttaggtgccagacactcttataggcgctatactgagtgttgtggaattctagcaggacacagagaaggtcagtaatttggttcacacagtgatggaattttagcaaatatgtggttcagaaaggcagagagcaaagcattggcagagtataagtggtaatgagctgaggattctaagcagtttaggaaggaagtgggtagagaacaattaggagccaacgcccaaaagcactagaagcatatttgacttctttaaaaatataaccctatgtcactcttttaaatcaagagtgctayctcttggtttaaaagaatatttgatcctagcaaattgtgtcattctaaataacagagagggaaattctctaacagaaaatgatatttattcagaaatgggcattgcaataggaatatgggtgccattgtaaactatgtgtgtattcagggaggtaaaggaagacaaaggtcttgtaagaaaaaaatgaggaggattacataatagttttgagataattatccttggctacaaggataagtaacaaaggtggtgtcagtccaagtttggaaaggcaattgctgggcagatgtcctcaaagaagtgttttctgtgtaaggttgtgatggcctttgtgtgaagttgtagtttttgcagaattttttgtggtagttttgttatcaagaacttgtgcgtgagaatcctccctttatggccttcccaagcactgtttttcagctgtttttggttttgtttttttcttgttgacacaagtgactctattttgattctgataactttcacatttccccccttttgatcaagatctttttctgaaagtatcaccattcaatcatcctgtagttagattttcattgtcccttggtgccaggatgtgtcccagattgttggtctggtcccatatcagaagacgtgattggtgagtaggaatctgtgtcaaaagcgttctagccacatttgagcaacaagggaggcttggaggaaatggctctcaggctaagtctacctggaatttattgctatgttcagttttgtctattccatagtattttggccacaatctcaaagcactgggccagcattattctgttaggagttgtacttctgcagaaatttaacaagcaacaggtacaagttttaaaaacaaaaatataaaataaaattaatagtaatatggtaaatccaagtttgtataatggttttgagccatgaatccagtcttaaagacaaacaattgaataaagcaaatgaccattgagaattagatgacatctgttgttactgtgtgacccatttaaaaaattctgtggatatgggcctcaacttccccagaggaatttacccaagtataacatgtagtattagtggaagcgtagacttttttttatttaaacaatagatacctaagaggtcatgttcttttaagttatgagcagaagctgctgattgtgaaatctgaattacatcattatcttgccaaagaaaaaggtaagcataagaaaggaaaaattaagaggggcaagagtctcattttgatggagtgtcttgggaaaygctgcctatagcatgaagccatcaacttctcttggcttgcagtttgaattctctgctatggtatcaggtggattggtgaactttctgtgtggcacaagacttgtccttcttttttcgggtatgagacttgtctcttgaaatttatatcaagttgtctagcttcatcttctaaggcggcaagcacagagcagtttttgctcttagttggagagttgcagccaaatattgaagaaaattaggagaattcaggttctgatcagatctacaggtagaagagaagaacttgaaaacaatgcacaggggcacagcctaataataggtgtattatagtttttttctttagaaacataacattctctctatagtcatccttatttttaccaaagataatcacagtaagactaatttgtttgtaaaatatgtttagttttatcaaattttgccagcaagaatagtgatttgaccatacggtaatctcaaacttaaaaacttcttgagggtaggaagccaaaccaaagctgacttcagactttatctgtagtacctataaacaatttaaatatgacaatttagtcaaaacttttgtgataaaaccaatgtttccacttgtatcccataataaagagaacagattcttatcaaacttaagtaaacaatcatattgtcatgaatagttttcccattttggagggatcaggtaggaagaaaaagtaaatgctttcatttttgttcacaaatgtttactttaccaagcagctgtaaactatagatggcttaagacaaaaagttttcttcaatctggaaaacaaaacattgaggaaaagaaccagcaatgtttcaaataaataggctataaaattttttatcagttcatttaatttcatgtaattaattcttttcctgcttgagcttgattattagtttcataaatttattagtttcttcattagagttctgaaaatttttatttagtacataatttttatttattttattatctaataactttgatcttaaagttattagaaacttatatttaagactacttyttagagtcttttccatgaatctgattgagtatgtctttagaaaagaactcaaaccagtaaccgtggatgacaaaaagatagaaaacaaccgtggcttaaaatctgatgaaatcagaaaaatagagtgcaaagcataaataaataaataaataaataaataaataaataaataaataaaatttgatgaaagttcatgataaccagaaattgacaaggaaatttggttactttgcggcatacaacataataagaattctgactgatatattagatttctaagagttttatatgatcttggaacattcatatcaataacatactcataaatgtaactgaaaaaagatctagcatcacttatcgtttgacaatgcttcccatacaatttactaartaaacctaatcatttaatatctctataagttgagagatacagtctttgaggctctccagggcccaactggaaaaatcacaaaattagttttaggtcagaaagattaaacttagaacttgaccctagggaaaactttcaaaaactgtcaagaggctgaaaacacttgatcaaaattagattacagaaagacttcaaaaacaatacagaaagttccatggatataaaacaaaccaacaaaaatccttaacctttccaaagctcagttttcctaaataatcaaaaaacataataaagacaatgtgaagcacaggaacttacaaaaatcttcatcttaggccaattaccaaaagggggaaagaaagaaaaagcttcctgcaatataattgcttcttactggaagcccgtttaaataacctggaagtctaacctgatgaaaaactacttgaatttaatcagacacaagaagagtgggtccagtggtatgagttkacatcatatcatagaagaagtaaacaagaaaactagtaccttgagcagaggaatacatggctctttaaaaaagtgaaaacatgaaattgcctggttagatggaacaattcaaacatatcaagaaaaaccaagattgcagaatcaagatatactggaggggaacattgcttttctagggcttcaagacaaacatttgagcatcaggtcataacagcagagcttgaagtagagaaaaaagtttcaggagctgacgaaaaagttgaaggagcgagttatcaacctagccaagcaaaaagatgtatcctctcaaggagggacaggaagagcagaaggcagtgttgtatgacctcaaatcctgtgctgcaagatacagcaaaaattgtacttctgagatatgaatctgaaaagcttcaagaggaaaactttacctcaagaaatgaaattaccatcctaaatgaagaacatagcacttttaatttgaaactagggaaagtaaatagactgtaaaacagaggctgggcatggtggctcacgcctgtaatcccagcactttgggaggctgaagccaggggatcacagggtgaagagaccgagaccatcgtggcctacatggtgaaaccccatctccattaaaaatataaaaattagcttggcatggtggcgtacacctgcagtcccagctactcaggaggctgaggcaggagaatcgtttgaacccggaaggcagargttgcagtgagccaagatggcgccagcactccagcctggtgacagagcaagactctgtctcaaaaaaaaaaaaaaaagaagctgcagtttagaagatggctgaaattttacagaattaaaaatcaaagactttcacaaattttactaagagcagattagtacttcaagaaaactctgttgttctaatataagaaaccaaaatcttagttttatatcttagttgtaaattaagttttaacttataaactaagttatgtatataatccttaatccttagaaagatatacataattcccttttatttatagcaaacttgattacacacacaaaactccttttataaaattcatccctcaaaaacctttcacgatctgcacagacctttgatggcatgcttaagccgttagttttgtcctatacattcgctttttaaaataacaagtcaccttaggataaaaatttactttccttgttcccttgttattttgaaaaattattcacttctaacattccatgccaaaaatacatcttcacacttaaaactttcttcacatctctgtttcctacttactggttcctttctgtcttgtttctatttcctttctaaattcgtattttgaaacaatctttaaataacctctaaattagacaaatttttctttttctcaacaaagaacatatttttatccctttcttataacttctcctcccaaaacacattttacatttattggtatgctttgtatacagaattatatatrttaattaaaattcaaactcttagtaacattaatttctaatgaaagtgtaggaagcaagaaattttgaactgttccatatcagtattttatatataagaatgattttataattttggaaacatgtttcctcataattttaatgtgtattaatgaacccaaatatatttgtttttctataaaatttaagaagccaagaacaaacttatatttgtgttcagcaatttgtttcaatattttatcttattttgaaatgacccagatacttaatgagtatctgttacttaatttaacataactttaaaattttaagttatcaaaaagattttttgaaactaagaagaattaatttataaatgattataccatttacattcacctaatttgtttatttttaacaattataactatattacttatgaaaactaagatattagacaaggctagtaattatttcaggctaattccttgttagccgtttttacaggctgtgactattaagcattcctcacccaactaagaaccataaagttaaatacttcagtatcttgccaataactcagaaaatacagctgctttcattaaatcaacaatattaaattagtattacttatcaaggaattacataaacaaagatcgttctctttttaggatggattcatagttctatgacattcatgtcaaacactgactccttaaaatatatctaacaaagataaatgtaaaactgcctgaccagtaaactcaggcacaaatctttgctgacaattcttaagacatttctgtttttattttatcaacaattttaaaatcagtttacttatcaaacatttacccaagtcaggtgaacttaaaaactttgaggtggctattatgtttttgataacatacttgattgaagtgcttaatttttcyctttaattaattaattaattagctctttgatatattttgrtagaaaaatacatacatgcaacataaaaacatacagacaacatgaatacatcgaagcagattctttagctttcattttgaaatgttaatcatgagacagcaaaacatagtaatttaaacttaccagtttataaaaggacagttgaatccaaattatatttctgacaaaatgggacctgttcacatggctaaattttatttgccctgataggtgatcttatgaaggctgtggaccaaagctttgggtaaagcagtttccacagcagtttgatttttagaaacctctttttctccttcaagttttaaactggtacagaggttaaatattcaaacattttcattttagatagcaccaactaaattgtgtagaaaaacaaaataycccrgtggccttgaattccggcaataaatttatctttttatttgtttgtctgatttacttgattagtcgatgcaggcaggaaagcattttagaaaaaggtatttaaagggtttttttttcccctcagcttttcctggctcacatacagcagacaaagcaaaatttttatgtcaaagataccttctattattcccctgagctcaagatttcgacctgtttgatctgagagcctaacttttgtaaaccttaatctagttctttccttcttagactatctagcttttaattaactaaagcaattgttaaatcaccctaagcaattgctagtcaatcaaaactaaattaacatttccaaaagggatgactcttaggtgtactggatagcttgttggctgtcatggaactactgtaatttgaaagccctctctttttttgttattttggctgaaatgctctttaaaaaacttgtaagtagctttggaaactagcaaaattaggttattttaatacaagtgaaaaagcagattcagagaagcagagatggggaaaaaaaggagaaaaaaagaagttgagagcctctacataccagcattttgttttaaccctatatttggtacaaaaaaaaaaaaaaaaaaaaaaraaaaacaagcttggggagttcaaataacgcctaagatggccattggtttaaaaacatgcatgaggaaaaaccatgtagctggctggagtcccagaaaaactggcatgccttaatgtttgagaatctcgttttgtttcttattaatctcttgagagaaaagaaatctatgcattctatcagggaatgtcaggagtttggtattttagatagtggcttttaattggccatctcacacctaccactttgtatgtttatttttgctctgggaagatgttcaaaagcaagcaagaagagaaaaaaagtacaagattcaaattatttatagatgtgcataaccagaccaaaatgaaaccaaaattagagtgctcacaaaaatgttaagccaggcatgctaatcaaccaaaatatcaaactaggcatgcagaccaaaagtgaattcaccagaagagacatgcatcacaaacaaagtacacgttctataaaaaccagagtactcgaaccagaagaacattgtccttaaaccagaaagggcttgccagaaaagacaaaagtttttatcattccagggggaatgcaaggtccattattaaggtggccttacaatcaaatcagatcccaaataatgtccaaaaaactcaccaaagggagagagtcagaaaatctgagaagaaattctccaggaccaaaaaggcgactcgtagaaacgaagagcacaaagggctcaggtgatactgctctccatttcaggggctgataatctatctaaggtgagctgacttagatctcacttctgacaccatttatataatcctaaataagagagagagagactctctgaaagaaaataatatttatttgggaatgtacattgccatgggaatacatttgctgtagtaatctatgtgcatatttagggaggcaaaggaagcgaacattttctaaaggaaaaatgaggaagattacataatttttattgatacatattgtacatatggggaacaggtgatattttggtgcacgcatacaatgtgtaatgatcaggtaattaggatatctatcacctcaaacatttatcatttctttacattgggaacattacaaatctagccattttgaaatacacaatgaattattaactatagtcaccctactttgctatcaaaaactagaaattattctttttatctaactgcatttttatacccattaaccaacctctcttcacctcctctccctcatcactcttcctagcctctggtaaccaacatttaactctctgcctccatgatatttacttttttagcccttgcatatgagtcagaactgtgatatttatctttttgtgcctggcttatttcacttaacataatgtcctccagttccatccatattgctgcaaatgacagtatttatataaaatttggccataaaaaagaatatgtatgtatatacatatatatgtatgtatacatgtatatgtatatacatacatatatatgtatgtatgtatatctcattttccttattcattcatccattgatggacactcaggttgattccatatctttgttattgtaaacagtgctgcaataaacttggaagtgctatatctcttcagcatactgctttctggggttttgtatatcctttgttcttgctttcttatttattgttattgcagtttggtgggttttttgtagtgataagctttgattcttttctttctctttggtgtatctattccaccagtgagttttatactttcatgttttttcgtaatgatgatgatgatctttttgcttccaggtktagggctcccttgagcatttcttgtgaagccagtctagtgctttcaaattttctcagtttttggttgtctgggaaagactttatttctccctcatttctgaagggtagttttgttggatatgctattcttgactgacaattttttgccattctttgaatatgtcatctcattttcttctggcctataaggtttctcctgagaaatctgctgttcctctaatagggattcccttataagtagctctatgcttttctcttactgtttttaaaattctctctttgcctttgatttttgataatttgactatagtgtactttggagaggactttttgggttgaatctgtttggggacttttgagcttcctggatttgaatgtccatatatcccctcagacttgggaagtttctagctattacatcattaaataggcttttttacaccctttacaacatcttctctttctgaaacttccaacttccagaataaaaatatttgttcacttaatggtgtcccataagtcttgtaggctgtcttcagtcttttgtctttttcattctttttttttctctaactgtataatttataatggcctatattcaagttcagaggctcttttttttkttgttgttttgttttttgagacagtctcactctgtcacccaggctggagtgcaatggcatgcaatctcagctcactgcaacctccacctcccaggtttaagctattcttctgcctcagcctcccaagaagctgggattacaggagcccaccatgcccagctaatttttgtatttttagtagagacggggtttcgccatgttggccaggctggtctccaactcctgacctcaggtaattcacctgccttggcctcccaaagtgctgagattacaggcgtgagccaccgtgctcagccagaggttctttgttctgcttgataaagtctgctttttcagctctctattgcattttttatttcattaattgaattctttagctgcgggatttctgtttggttttttaaatgatatctctgttgtacttctcattcatatcatgaattgttttcttgattttattgaattgtccatctgtattttctagtacatcattgagtttccttaagataattattttttaattccttttccatcaattcattgatttactttttattggggtctcttactagagagttatgttcctttagtgatattaaacttccatgctcttttatgttttatgtgtccctgcattcatgtctgtgcatttagtggaacaatcacctcttccaaactttctagagtggctttcatagaaaaagactcatctacagttgggtcctggtgtgctcgttgggaaagatgtggtgactctgtttccaagtaggtgccattttatagtctctctgcagcttctctggctgtgttgaacatcagtaataactgtaggcacctcagtggtttaggctgtaggactttgtggtagctgtagtggcagtgtttattgttaatatcctcagtggcaagggcttccggggtcttcctattcttattttccccacaatggggacacttagctgagaggatccttcttgatgtcaggtctgacacagcctagaagcaattgcagtggcactggtcacagaggcaggtgcccagagtggctgtggggccagagttctgtgctcaagatctctcaaacctattgtgacacttgggtattggggtgcagatttgctctctgtggcagcgttggaggtaggttgttcacagagccaggatctgtgactctgaggtaccccctagcagcttgggtccaggaggttgggttgtagctgtgattctgccctgggaggcagggcacagccctggcctgactccaagaaataaaggatactctggaggttttagcccagggcacaggatatggctgcaatttggaagcctgaaccagtagggcttggtggcaactcgggtccctagacatgaggcactgtgtagtggtaacagatggggaaaggtatgacagtggctcaaaactcagcttagggatgtcaagccatgggcagggatgattcaaaagcagtttagactcagggatgaaagactgccatggctactcgcacccagagcaagatacactccagcagtaattccatttccaagatggtgtgtagggcagtagccatgtgggcacagagggtggggctccttctctagagggaagagagctatatggactccaggcagctccttcaactgggcttaagtgcttgtgagggctgcagaggaccccagtggtaaggactgtaggtatccaaggtgctgacaggagctgctgcgatcctcttgcttactttttccctatggagagaagttcctccaggttcccagcttatcctagctgggggatagggtggtggaagtcaggtgtttccttctgttctctgtgtgaccatcctgagtttctgtgctccccggagtttctgttattgtttggatgtacttcagtgccctccttcagttatttttattaaaatgtaattatttcttcattgttttatctgtctttgttgaggggacaagcgctaaggacttctagacagccatcttgctgatgtcaccatctgcataattgttttgagataattatccttggctgcaaggatcaataacaaggatggtgtcagtccaaggttggatgggcaattgcttggcagatgtcctcccagaagcattttttgtgtcaagtagcaatggcctttgtgtaaaattgtggggtttgcagaatttttttattgttttatcaggcatttgtgcatgagaacccttccttcatgaccttctctgtctccatttttcaaggttgtttttaacacaactgactccattttgattctgacaactttcacacctaccgggatttaaaattaaattctgcatcttctgacttgagatcttctgtaataattaaacattaatttcctgccactgaactcctaaagcattagaggctcataccttaagtcttagcacttgattatacatgttgagtatctcttactcaaaattattgagactagaagtgtttgggatttcagattttttctggtctggggtgctcaactggtatttaattttataattcattgtgtactgactcgtattactccctaactgtctcctgtatgctatatgcatccattacaaacaagagcatggagtcttaacccagatagacatggatcaaattgcaaggtgcaagatacttaacctcttcaagcctgcatttgtctgtaaaactgacataacttgcagactattttgattaaaagagataatctatgtaaaagcacctagcacagtagaccatccaggaagtatttcttcttctttctttccttcttgagagggagggcctatcagtacttcttttgtgtccactgcactgtgacagggacactgtagagatccaaatagatttaatgaataaaataataatgccgcattccatggccagaacagagtttactgtggggagtctgtgtgtgtgtgtgtgtgtgtgtrtgtgtgtgtgtgtgtgtgtgtgtgtgtgttcaactgaatttccatagtgatattgagcttctaaatcaagaaaaatatttttttctaatttattttttaaatattttaagtaaactttattgtatatgtgtaaggtatacaacatgatgttaagagatacatctatatagtaaaataattattatagtggaacagattgacacataygtcatctcacatagttaccttttgtcctccccacccacccaagacatgagcagctataagatacttatttagaaaaaatcctgactgcagtacactattattaactatagtcctcatgttgtacattaaatcttttcacttattcatcctacatatttgctactttgtatcctttgacctatagctacccatttcctgtcctctccctgccactgcccaaccctgatcctagtaactgctattttattctctctctctctcactctctctctatatatatgtcagataagtggtatatatatatatatataccacttatgtatatatatatagtatatatatacacaacatatgtgtatatatatagtatatatacacaatatatgtgtatatatagtataaatatatactatatatagtatatatatagtataaatatatactatatatagtatatatatatagtataaatatatactatatatagtatatacatagtataaatatatactatatatagtatatacatagtataaatatatactatatatagtatatacatagtataaatatttatatattgtataaatatatacaaatatatgtatatatttgacttttctgtagagattggggggagggtctcactttcttgaccccaggggtcttgaactcctgggctcaagcagtcctcccaccttggcctcccaaagtgctgggattatcaggtataaaacaccatcgctggccaatatctgatctttatttaaagattccacatataagtgagagatcatgcaatatttttctgtgtctggcttatttcacttagcagaatgtcctccagatccatccatgttgtgacaaatggcaggatctctttctcttttacagatgaatgatattctattggtatatctagattgtttccatatcttggctattgtgaaaaatgctgcaatgagcatggcagtacagacatctttatgcggtggtgattacatttcctttgggtatgaaaggaagagattgctgcatcatatggtagttctactttaaatttctttaggaacctccatgttgtttttcataatgactacagtattatacattcccacaaacagtatacaaaagtattcccttttcttcacaccctcaccaacacttgttatgttgtctgatagtagcaatcctaacaagtgtgaagtggtatctcatggtggttattatttgcattttcctcattattagggatgttgagtaccttttcatgtacctgttggccatttttaatatcatctttggagaaatgtctatycaagtcctttgcccattttgtaatcagcttatatattttcctgctaccagagtgtatgagttctttacaaatcttgaatattaaccacttatctgacatatggtttgcaaatactttttcctaatctgtaggttaacctttcatactttatttttttgagacagagtctcactttgtcacccaggctggagtgcagtggcatgatctcagctcactgcaacctctgcctcccaggttcaagcgattctcctgcctcagcctcctgagtagctgggattacaggcacctgccaccatacccggctaatttttgtatttttagtagagatggggtttcaccatgttggccaggctggtcttgaactcctgacctcaagtgatccaccttcctcggcctccctaagtgctgggattgcagccctgagccaccacgcctggtcagcctttcctattttttattgtttcgttcactgtgcagctttttagtttgatgtagttccatgtatttatttttgcttttgtagcctgagcttttggtgtaatacacaataaatcattgccaaggccaatgtcaagatcttttctcctgtgttttcttttaggagttttattatttcagtcttacttttgggtctcttatccattttgagttgagttttgtatctggtataaaataagagtccaatttcactcttttgcaagtggaaatctagcttccctagcaycatttattgcagagactatcctttccccattgtgtctttttggtgcccttgctgaaaattggttgaccatatatgtttgcaattatttctggactctattctgttccactggtctatatttctgtttttatgccagtatcctactgttttgattactatagctttgtaatataatttcaaatcaggaagtgtgatgccwccaactttgtttttcctctcagaattgctttgggtattcaggatcttttgtggataaatacaaattttagaattgctttttctatttctgagaaaaatatctttgggatttttatagggattgtattgaatatatatattgctttaggttgtatggccattttcacaatattaattactctgatccatgagcacttatttgtatccttttaatttccttcatcaatattttatagctttcagtatacaggtctttcacttccttcgttaaatttattcctaaatattttacttctttgatgctatcataaatgggattgttttcttgtttgttgttattgttgttgttgttgttattgttcaggtcattggtcaataaatattacatttagatgaagcatgtgttagcttatatttgtaaagccgatttaaaattaaaatgtgccattcccaaggcagtatatttcagtaacacagtgctgattataatttgaggacttagcaagttgtagctgacacactgagtcctgttccaataggtaagtcgagggtttggggcaagtcctatgaggatcagctggagccgggaagctggaatggccgggtttgcctcccggctctgcaggaaacacttgtgcttgatgttgaaagtcattggtggtctactgcaaaaataagaacagggatattgaagaggaacagaggtcaaaaggatgtaagtccagctttccccaaagactgaaataaaaatacttgccacagttggttcaggcagccagcaattcctggctatctccattggccctggggccttagggctaattgattctgtaagaagaaagacaagttccacttttaaacctcataaattcatatggataaattttcaccattcttgactaaaaagtcagaaatgyccttcatagcttcagtataaatattaaacagtgtcagtatatcacttaggttgccaattctgagcaaggaattcaatagatttccactctgaagacataaaagtgaatgcctcatcactatgcatagctggcatgctctgtcacaggaatataggagaaacctttgcagaaggaaatgaaaactcatagaattatttatttcaaagcaacaggatatactctagggttagaaaacatatgaaggactgatcagtagagactgttttcttttaaaaaaaaccctgttattcttgtcagacaggwattataattaatttcgtggcttctctaacatcttattaaccagatgaccttgaatgccaagtaattctgaaggcaagatgaaatcatttgtgataacacaatagtatcactgcctaataaagaaaaggaattagaactcaggtgtaacccataatctggtatgtcttggagccttaaaagacaggaaactgttgttaatgagaaaccaaataacctcctgggattattgtgtatttacaaaaggrttgggtagtatgcaaaaacctggaaacccagtctaaaagcaaacataggcttataggcttatgcaaacttaaatgtgggtggtaggagagagatgtgatgaggttgccctttgttcctcataggtagttgccaaggagcagaagttaccattgtctaaccattgtccatccaggcttagggcaccgacgagcatggaagggaggctgacagggggcttagggctgctcagctgaggcctacaggtccccctygacatgaacagcctgggcactgtggacagcgggttgatggcagtaggaaaaagacatgcccttgggtggaaaggggcgggtcctggtgaagccccaccttcacaccagggatggcctgaagcatgggggccaggctgccagttcacagactggagtaagaacttgtggtgctcttttcaggcccatccatggcttcccatgggccaatcagcatgcccttcttcccctccaaagcccataaaaatctcagactctgccaaacttgggcagacgatgggacaacctgcctgcagataggaaatacccactctgggtctcctctccgctgagggctgcagagacattgggatgacctgcctgtggacagcagctacccactccagtctcctytccactgagggatacagaaacatcaggacaacctgcctgtggataggaactacccacttcaggtctcctgagagtggtattgttgcttaataaagcacctctttgccttgctcaccctccagttttctgcatacctcattcttcctggttgcaggacaagcacttggaacccatggcaggactgaaagagctataacacaaacaggactgaaacatgcccttcactcaccacattgcagacaacaagaaggagggaagaaagagagaagagctgtggccctctggggaacccagacttaggaactccctgagccagggctgtaacaccctctttgaggctctgtggttccagtgtctccgagcttccaggtgccaccatgttccctggtgctcacagtggaagccacttgcagtatgcctggtccagccacagcagagagctggcaacaagaattgaggtttgggaacctccgcctatatttcagaggatatatggaaatgcctggatgyccagggagaagtttgctgcaggggcgggctctcatagagaacctctgctagggaagtacaaaagggaaatgtggggtcagagcccctacacagagtccctactggggcaccacctaatggagctatgagaagaggtccactgtcctccagaccccagaattgtagatccacagacagttagcaccatgcacctggaaaagccacagacactcaacaccagcccatgaaagcagccagaagaggggggtataccctgcaaagccacaggggcagagctgcccaagaccatgggaatccacttcttgcatcagtgtggcctggatgtgagacacagagtcaaaggagatcattctggagctttaatatttgactaccctgctggatttcagagttgcatggagcctgtagccccttcattttggccaatttctcccatttggaatggctgtattcacctagtgcctatacctccattgtgtctgggaagtaactaacttgcttttgattttacaggctcataggcagaagggacttgccttgtctcagatgagactttggactgtggacttttgagttaatgctgaaattagttaagactttaggggactgttgagaaggcatgattggttttgaaatgtgaggacatgagatttgggaggggccaagagtgtaatgataaggtttggctatgtccccacccaaatcttatcttgaattgtaactcccacaattcctgccttttatgggaggaacccagtgggaggtaattgagtcatgggaggggttgacatgccctggagacattttccccattgtcttggggattaacattcggctcctcattacttacgcaaatttctgcagccagcttgagtttctccttagaaaatgggattttcttttctattgcaatgtcatgctacaaattttccacacttttatgctgtttcccttttaaaactaaatgtctttaacaacacccaagtcacatcttgaatgctttgctgcttagaaatttcttccaccagataccctaagtcatctctctcaagttcaaagttccacaaatctctagggcaggggcaaaatgcttccagtctctgctaaaacagcaagagtcacctttgctgcagttcccaacaagttcctcatctccatctgagcccacctcagcctgcaccttgttgttcgtatcactatcagcatttttgttaaagccattcaacaagtctctaggaagttccaaactttcccacattttcctgtcttcttctgagccctccaaactattccaacctctgcctsttacccagttccaaagtcgcttccatattttcaggtatctcttcagcaatgccccactctactggtaccaaattactgtattagtctgttttcacactgctcataaagacaaaccccttctaaccaaatgagaacacacttaaaatgtccagtttttcactgaatattcatactctttaagaaatatcagagtcaacagtttttattaagtgcctatcctgtgccaagagttctcatgatctggtttaatcttcacaacagtaaaaaaaattatcattatccccaaggtcacacaactaataacgtcctcactctaagttcatcactttccaataaggcatgctgctgccccagaatctataataactatcctcaacaaccttctgctaaccccctcaaaaaactagcttgatcttaacatcatatttgcaatcatgtaagttaatttcttcacgggtttgtaaaatgagcaagttatataaacatatgcctaagattgtaagaaatgtcaagtttgtgtttgcttgtctttcaagcataatactctttgatttccttattttgttaaatttaataacttttttattatttataaaagcaaaactaagctggtgcagtggttcacacctgtaatcccagcacttttggaggtcgaagcaggagtatcatttgarcccaggagttcaagaccagcctgggcaacatagtgagccctcatctctaaaaaactttttttaattagccaggcatgatggtatgtgcctgtagccctagctattcaggaagctgagctgggaggatcacttgagcctgggaggttgaggctgcagtgagccatgattctaccactgcactacagcctaggcaacagagagaccctgtctcgaaaaaaaaataaatacataaagacataaaagcaaaactacatgctatggaaaatttgaaaaaaaatacaaaaagtataaagaagaaaattaacattgacattatgaagyatttccttgattgatagacatttaataatgttataatcagattttgcatttaataatatagaatttcccatgtcatcaaataatttttgtaaacacattttaatggcactataaaatataattctataggaacaccatatttattttcatcattcccttattgcagaacgcctgtttttcctttcatcttttcactgttataaataatgctgccctggcacatcatggcacataaacttttcctaaatctctgaatattrctctaggagtaaataaggaccaaagcgtataacggatagcattttcaaaccctctgaatctcaatttgcacatgtaagtacttgggtacataggagctgcttaataaataatcttgaatgaataaacatgacagtaacgtcagtctctcagggttgtacttgcagttttccaaatcattctcttcctctcaaccatgcttttgtatattctatattctgtcggcgattgcctttgcaccatttcacctggttaactggtgcctgtccagagaaatctctcctgacaagaccctcctaccccagggacctgaaatctgtaaggtacccatttgaagcagtctgtgcttactgaattaatcatgtggaacaatcacatgtttctacctatgtctgcccgccagattgtgagttccttgaggacaaggactatgttttatttctttatttatgtacttttctcaggtgcagaggcccaagttaaacatatctttcggttcagggaaaattgccattatttctgtgaaaatccacttcgtattttccccctttgatatattactttttaatttattcttttttatatccccgtaatcatcttccatttttctctcctgcacaagcatccattataatgcaattatatgtatctttttgtttgtatgtattttcaaaatgagctatgttgttctatatatgtatgtcttacttaattttaatgaatcgacatacttctgtatcaacacttgttcatgactggcatatctttaattttcaataaatgcctgtggaattatgaagaaaaaaggatagcattgcaatattctccttctttcttatcagatatactttaataataaatcaaggattattgattgggcaaaggactccaaaaaggaagatttttagataaggctgtttatttaaatgtttggagtaagagctgtcagattggatccaatttagtcccacatgactcatgatgcagagtatattaaatgctaaaatatctgcagtctgttgatcaataaggtagttctccaaaatgccagtcacctatgcggccaggctagattaaacggtgccacaacaacatgcattagagcctctcatgcttttccrtggaacaagttcactccacattcagtccttcattcagccaagcatagatagaacaaacaagtttcactgggcctggctgtctgctagtgcttccatgagcttctagaaacaacaatattattcaaaacatccaagagttcttgtaatttccaagcacacatgctttcttaaatacctacagccagagtccagaacatatccatttatcttcctatgtttcatttgatctcattttatctgtggaggcaaatgtgtttttattaaaaagaaaagaaatttgtggacactaaactaggaagcaaaattaaatagattgtataaaatatttcatacagactaaaagctatagagaatgatataacaaacatcatttatccactgccaagcttaagaaataaaacattgcaaataactgaaaacctctgtgcatcccctctttagtcacattcctctggcctgtccccagagatgtccccgttctgaattcagtgtttgtcaatcccatatttgtctttctatttctgctgcatgtgtaggtatatctgtagaatgtgagttcccagaaagcaagtacttttctctgttcactgatacatcaccagcacctagagcaacacatggcacatggcaggttttcaaaaagtatttattgactgttgaataaataatgtatttgtaataatgtcaggattttttcatattttaaccccttataaagtgtttcatattgtatatatccttctgcaacttaatttgtttgttcaatctatgctgataatgtaacttggctccattcatttcactgcagtatagtattccaatgtaagattagaagactatttatttatctgttccaatcatgggcatctaggttgtttccgatttctaatattgtaaatttgttgcagtgaatgtcctgatactgtttttttgctccattgtgtaagagtttttctataataaacagcaggggagaaagtgagaagggactgactcttgcctctactatatttcttcctcttccaaatctctaggtgaatgggaagttgggaaatcagctcagccctctgggcatcagcttcctcacaaasaagatgaggccagttggtcagccaatcttttaatgggtttatgtatcttcgactttattattagcaacaacggtataagtagttaggaaaggactaatttcctccatgtaaactttctgtatttttctgaatcagtttcattccatagccctattcttattggtaaaggaactttcattctcagtcattgtacggggagcccctttttcctcttctccagggtcttaatagggtctggaaagactcacctggtccaaaaagtttgaggaagaagcttctagtcttcagctctgtagggtcaacatgagatgcttattgttcaagcctgtgtgatccacccaaaagtaggctgctctactacggcatccatgctgctgtgaccggatggaccacaggacagttgagaccccagctagatatctgccaaacccaggactgtcagcaagggaatagggttcaggtcttctccatttataaactaccaacccctctttactctggaatattctcactctcctggctgggatagacagtgttggctcattccactcccctcaaatcctactcctaattgtatgccatcttggtcagtattactccatccaccccaggagcccagagcctagccattctctctctctctctttcatgaaccaacagcaggaaaagaaaaagatatggttactttctcatcacatatctagctagctttatttctagatattttaattatttgtattttcatctgctttatttactctgaaaatgattgcattctaacaaaatatatttaaattctgtagaccagaccatagctattttgtttaatttatactttccaaagagaattaatagatttaccaaaataggaaattaatgtttatcaccaaaacaaatcattatcaggcaaagtcaagttgaatatataacacttatacccgcagctcttcacaatggaaaagttttaactgatttcatctcgcacacaaataatttgatgacattagtcttacacattttcttgagtgggtctaagttgccatttaaatggatatgttctctctcaagtttttttttttcttttgtggagtttagttcataaattacaatccttatcaagagttaaaacttcaagtgtcatcttctctctggacaaagatgttgagcaagatagttaatcatgttgcctttccttttttgctctatgataagaagctttttccactatccaagcaatgatgattaacagctcacttttgctgagcactcaatttgggtcaagtattaaactgagtgtttcacatacttctttatccataccagagccctatctagcgggcattagtaagcccgtttcatagatgagaaaactgagactctgagtgtgaaattacttggccaaaaacatctagtatatcgctaacgcaggaattgaaccaaatctccctgacttcaaaactgctgtaatctgaatgattgttttcccccacaattcacctgttgaaacctaatcaccaatatgaccgtgttgggaagtaaggcctttgggaggtgattaggtcgtkagggcagagccatcatgaagacatgagtgccttataaaagaggccccagcttgccccagcaagctgccttgcccatcccaccatgagaaggaattccaccatggcaggcaatgtttgctggagaaaatgaagaggggaagcccctaaaacagcaagtaattcctcaatataagttttgagatttaatagtgagggcacagccagaaggcatcatctatgaacaaaaaaacaggccctcaccagacactgaatctgccagagmcttgaacttctacttcccagcatccagaacggtgagstataaatttccattgcttrtaactcacctagtctatgatgttttattatagcagcccaaacagatgaaggcaaaaactactgctctgtacccaatagtcattaccctagctgcacattagaatcaccgggtgagctgtaaaacctccccacgttcacgccccacccccagagattctgagaatgaaggctgagcaaagttaggttttgaaatctccccaggtgattgtaatgtgtgtctggcatgagacccactgtaactagctaggaaggctgacagctgaaagggatcaagtcttccagaatagagcagatcaaaagcaccaggagtggtggtctccaaaatgtaagaaagtatgatttttaaaattcatttaaatgtgaaggaaatgtgctaattcatgaaagtaacccataaaatcagagaagagtacctgaagtgcctaggattgtgcagtttccatgcagttattcagctcggactttgtccactctaaggcaatgtctgtttggagaaaatgaacagtggaagcccctaaaacagcaagtaattcctcaatactaagagtgaggtttcatagaatttagagaactgtaatgataagactctactaccgcagttgtttcctcagctgattgagccctgtggcagattttatctttgtttttccacctgcttaaggacactagtttctgatctcccaggaaactgggagtaaaccccaacctgactgcagctctcacctcagcatggagaggtttcacttggcatctgcctgaatacagatgtctccgaaggttaacagcctgttctggtgttacaccttgctagagaagagagccatcttgacctggatacatttctccatctccaagcttgggctggggctcagggggagagtaagaaatgactgggcagagagcatgtgccagggagcaagaacagcaccttcgaaggcacagacttaaaagaacgaggatgggcctcagttccaagtatggagaccagctgtcccagcttacctggtaaaatgccccatcttaggaaacctcttcatcctgagaaaatgggatggttggtcaccctagttccaaagaaccatgcagaatggggaaggagtgacgtgcagggcatcactgaagcctaaagcctgctcttctcacctgccccatgcagccttttctgaaaaccaattaactcctctgtgtgggcctggttgagcctcattctagtatctggggtctgttgtcttcctctctatgcatcacttcacttttctggagcacatcctgtagtagtttccttaaaaaaaaaaaaaaagtcaatgggaggtacattttctaaaagtcttccattgcaaatggctttattctttcctcataattttctgacagtttgcctgggtttttaatccttgtgttcgcaaatcagttttcctccaacattttgagccactgtcttctgccttgccatattgtggtcaggcgttgttctgattttcagtcccctatccttgtgacctgtgccctcctctctcctcacattcctggaagttttaaagatcctgtctgtgttcctggtgttctgaagtatcccactgatgtaccttggtgcagatcttctttcattcactgggctgcacacctggtgtgatctctcaatgtggagacgcaggtccctcgggcttgggacattttacagttggtttttattctttgctcattttctaccctctgctctttctgttcttgctttttagaattggatataaggctttcagaattgattctctccttctctacctaaattttctctcattttctacctaaattttctactaccttctgcttgctgcagacttccttaacttcaccttccatctgttctattgagtttatttcagctatcatagttttaattttcaagagctctttctttctttaactgttcctttttcaaaccatatgtttttagttttgtgggtgtaatatcttcttgtatctttctgagaataatgtttaaattgctttctaaattttctttgtctgttgcattatttttgtttcctttggattttgtttattgggacctctttcctttatatttaaaagttttctcctaagttttgagattcctggctgcccatttgtattcrtgtgtgcctgggggccactggagtaggaggctcagccagtggtgggctttagtccagcatatttaggccgtctattagcttcctatttgctataacaaattaccacaaacttagtgacttaacacaaatttatcatcttatagttctggagactggaagtcctaaagtcaagatgtcaacagaarccaggcatggtgcccagcccctgtggtcccagctactcaagaggctgaggcaagaggatcactggagcctaggagttagaggctgcagtgagatatgattgtgccacttcactccagcttgagaggcaagatgaggccccatttcttaaaaaaaaaaaaaaaaaaagggcaaaacaaaacaaatgtcaggggtggttccttctggaggctctaggggaaaatccatttccttgcccttttcagcttctagaggctacacactccctactttatggctccttctgtcatctttaaggccagccttttcaaatctctcactcctctattgtcccctctcttccttgctttctcgcactgcttctttcattatgtctcctctctgacagtgaccctcctgtgcaccaaacctgagtagtcagtatcatctccccatcttaagatccttaactcaatcacctctgcaaattcccttttgtaatgtaaagtgtattcgtccattttcatgctgctgataaagacatacctgagactgatcaatttacaaaggaaagaggtttaatggagaactcacagctccacattactggggaaacttcacaatcatgacggaaggcaaggaggagcaagtcacgtcttatgtggatggcagcaggcaaagagagagcttgtgcagagaaactcctgtttttaaaaccatcagatcttgtgagactcattcactatcaggagaacagcatgggaagacccacccccaggattcaattatctcccaccaggtcccaccatatgggaattatgggagctacaagatgagatttgagtggggacacagagmcaaaccacatcataaagtaacatattcacagcttctggggattaatacatgaacttctctgggaaggggagtggcattatttagcttaccacaggcagggaccagtcattcctagtagacctccaaagccagaagagagagaatttgctgtctttttctaaacagggaacttctggtgtcttgcccagggagcaggatcctggctgttggttcctcactgcacagggagttggtggtctggttgccacataagcacattttaatctcattttcagcctctggattccctcagaggtcctgggacctggggcctttgtcttccacatgtatcctatgtggaaaatgtccacatcacacttccacrcttttctccgaaggactcagacatcttatttttaaatagatctaaatttattgctgtcttccttaaaacccttttaatggcttctcactgcccttaagatgaatttcaaactccttacatggattatacttttccaaatggttaggcccttgctcacctctccagcctgtaacagttttccaagcattctttacgtcccctgctgcagccagttttggggtttgtctttgccaatttatttctctgtgtgccccaccaccaccactaccccagtagactggaagatccacaaaggcagaaaccactgtcttcactcatctgcttaacccagtggttctcaagctttaaggagcatgagaatcatctagaacactgattagaacacagtctgctgggccccatccctacagtttctgattcaataggtctgaggtagcctaagaatttgcctttgtaatgagtcctcaggtaatgccgatggtccagggaccacactttgagaaccacagatttaacaaatacttattaagcattatcttgttcacctctataccccagcagctatcatagtatctggctcatagtagagcctcagtacatggtggctatcattattatcatgaccaataaaaggagttagaaaaggaagtgggaagaagagctactgtgtacatttttctagagtttcttgaactagaaaatagttgcttaactgtgacttctgaatcattaaaatacattttataatattttaaagaaatgcaatttataatctttaatctagtataatgcaagtaccaagaagaaacactgacattcattgaaacctgtcaaggctctagatcttatggtcttaatgagcagaacaatcacttcaggctcaaagtacatctggtatctcagagatatgacacacttcctgaacttgcacaagaatgcaaatttcattaataaaggagtcactgaggcatcaagacaaaaataaagagtattttaaaacacaagactgtgtccaatcaatgctgataaagtgattcagacctcacagaatgggtcaccatagtcacaaattaagcaaaggtgtagataagagattatattattgctagcttcattacaaaagatgaatcaaatgaagagcatttagaatagtagcaaacgtcacaggaaatatacaaagcaagacaaagaaggaatggatatttgtatataaacacattccttcctcattcaaacagatctgctattgaatccaaattaaaattagaacatacatttgtttgttcatagactttggctccagtaaaaatgaaagaaatataatctccactgtcttttagaagttaatttgccagtcctgagaatgctctatatttcaaattcgtttaaaatgattcagaaggacaatcaaaatgttgtatgcatacacaatgaaatactattcagccataaaaaagaactaaatcctgctatttgcaacaatatggctgaacatggaggacatgatcttaagtgaaataagccaggcacagaaagacaaacactgcatgatttcattttatgtggaatttttttttttctttttgagacagagtctcaccctgtcactcaggctggagtgcagtgatgcaatctcggctcactgcaacctctgcctcctgggttcaagctattctcatgcctcagcctcccaagtagctaggattacaggcacgtaccaccatgcctggctaatttttgtatttttagtagagacagggtttcactatattggccaggctagtcttgggcttctgacctcaagtgatccaccttactcagccttccaaagtgctggattacaggcgtgagccaccacacccagcctgtatgtgaaattttttttttttttttttgagacggagtctgggtctttcgcccaggctggactgcagtggygctatctcggctcactgcaagctctgcctcctgggttcacaccattctcctgcctcagcctcccgagtagctgagactacaggtgcccaccaccgcgcctggctaattttttgtatttttagtagagatggggtttcaccgtgttagccaggatgatctcaatctcctgacctcgtgatccacccacctcgacctcccaaagtgctgggattacaggcgtgagccaccgcacccggccctgtatgtggaatttttaaaagttgatctcatagaaatagaaagtaaaatgtggttaccagaggctggggtggttagtggggaggggggaatggggagatgtcagtcaaagcatatataatgacagrtagaaagaatacattcaagaaatctattgtggccgggcacggtggcttacgcctgtaatcccagcactttgggaggcctatgtgggcagatcacgaggtcaagagatcaagaccaccctggccaacatggtgaaatcccgtctctactaaaattagaaaaattagcggggcatggtggtgcgcaactgtaatcccagctactcaggaggctgaggcaggagaattgcttgaacccgggaggtggaggttgcagtgagcagagatcgcgccattccactccaacctgggcaacagggcaagactctgtctcaaaaaaaaaaaaaaagaaagaaatctattgtacagcatagtgactatagttagcaaagatatattgtattcttgaaaaatgcaaagaaagtggatgttagtgttctcaccacaaaaatgataactatgtgagatgatatatttgttaattagctaggtttagccatttcacaatgtatatatactgcaaaacgtgtgtgatgaatacatacaattttatctgtcaatttaaagtgttctaggaacattatttgaagaatgaaaagttttctttatagaaagataaatagtagtctttagaaaaacatttctgactttatgctttctaaaaagatttcctattttttcacaagctcttatcctactsgaaattcatacacaggagagccaatggtgtatattatacacaccataaacttttagcattacaacttccacacaagaaagtgatcaagccaaggaaccctctcactgccttgatccagcgaggctggrcctggcatgttgtagatgcttaacaaatatttgttggatagatggatggatggatggatggatggatggatggatggataggtgaataggcagatgaatggatgatttatatgtgagtcctgaattttccatttaaatttttttacttgagcaatacatattcattttataaatattataaaatatagatatttaaaaggaaaagcatctataaccatgcactcacatttaagctatttaatatgctaacatctttttattataaattcttgtgaatatatatatacagttttataaaaatgggatcacagtatatccactatttagttacctgtctattcacataatatgttatgaatctctttcagtattaatacacatgctttctcactatcatttttaatagctgcataaaagtaggaaaaatacaataatttgggtattttctgggcttcctaagcctcaatttcaaaattataatcaataaatatggtggtactgttccctrtactttaaaacaataaaaccgagtttgttgaaaataccattgagatagctaagaagacaattattactgataacttgaaccctgctttactggagaaaataatttgtctcaattcttcataaagtggaagctctgcaatccttaaagttatcttaaaattcattctagcttattgtgactagcttgattatacccctgctgccttatttgcaatttagtaccaaatctttctttttatgatgtgcaaagaatctagattctaatgggattctcataaacatggattacttgggtatggattaatgaaccattacaaataaattatagaatttatagacgttggaggggggaacttcttctctcctaatgtttaagaagggcccaataacaagcaccccaactcctccctgactgacttctgaacaactgagaagtctccaaataatctctccttctctggggaggagtaagtgagggatcagagcacagcacagttagtctgatcatgatcagcttggttcacattgatttagagctttatggtttttgtacatctcacttaattcaagaaaatgtcaacgtgtcaattcaacaagcacatactgaacatctactaaatgtcaggcactatgccagattctggggttacaaaacttaatcaagatttacctagtccttgctttcaaaaatctcagtctcttgggaaagacaggcaatttaaaaacattccttcactatgtgagtgtcttggttaagattctttaggttgtaagacacaaaaacctgtttagctttaaaaaaaaaaaaggtaaatttattgtaaacctatggagwcctctcaaaaatccaagaaagaatgcatctgaaccctaggaacagtgtggaactgggtgtggaaaggtcattaagaatttccctccgttgtgtgtctgtttccctctatttttcccttattataggcctgtttcttcccttagttacatagtaaaagcatctaccaactggtacagcccccakcagggaggccagtctctttcagtctgaattcctagagaaggatgctcattgtccaagcttggttcaggtacactcctcatccaatcacctgtggtcaggcttacatgataggggtaggaggggtgcttaagcagagtccaataggtatccagtatattgagaattataaaagtgctatgggttaatgaggagggagccacttactctgccttctatgttcaaggcactatgaaagatgaaaagttgaataaaatacacaactaattctgacataggacagagtattgttgtagcacttttgcttagttcagctgaagacagggtcctttgtcccacagccatgaaaattcaggcttgcagacaatttgaatggtaagacagttttaatgggtgaaaaggaagaaaagggggaaacagggactctctcaaggccagagtcccctgctagaatgcttcccacctggcagattgaatgccaggttccacacaggaagaggaggggccaggctccttcctgctgcaaagggtgccaacttccccgaggctccaccccagtgcgcaggycggttggagtttttccggagacctcctcccacctggctgtttcagtacgatgtgatgtgcacagttacagagatgtaacatgctcagtgaacacattggagaggagattggttccagtgggggaagaagagtgacttgagttcagtcttaaaatgagtcttttaatgagatgagttgggtaggtagctaggcagatcattctaggtgaagatgataggctgaacagaagacagggcatattgagggacagccgggaggatgtctgggctcatcagtggcaaagataagcctacgggataggctggcccagatcagaaagagttttgcatactacagtagtgtaaagtccctggcagccttggagcagagcgataacatggaaacatgacattgccactcatgtggagaatggactgaagtggagagactggtttcagggatgctagtcagagggcattttaattattaggccaaaagagatgatggaggtgcagccaggggagaagcagggggaataatgagaggagagagagatttaggagaacaagggagagcgaatatccagtaccttttatctaattccagaattaaattctgatggcagactttgggaactctttgccaagaaccagggtgctaactttgtggttgctcttggaaagagggagcagcgtcttccctttgcttctctgcttctcactgtgcttgccctcctgctctgcacactgcttaaatattgttagctggtgcaaggtttgaatcctgatgaaatttccaaaccctctcttcctgggatatagttttctcattcatgaaatggaagtgctgccacttcagggtcctgtaaagagataatgctgatgccaggccagggaaaaaagcagtactcaagatcacctttttttaaagttcactgcaacattcagtagatgaaaaatgtgtagctgtaattcattgaaggcaatgagtagtctgttcttgagttaccatggcaactgctcaattaagtgaaaaaaaatgaaaaaataaatatactacagtttctcttgagcttaacatcctttaaaaagaaacaaaagaaagtaatatgcttggtgagatattttccccaaagctttcctaggactttgcatttctttgctttacctcttaaccgggacgtcttattcacctgctgcatactgggctgaatgctagagttgttgttcatggttgggaacacacacaccttaaattttcccctcagaatgctctttggtaatgtttccttacaccgatgcttaaacagaattctgaggtggtggagtggagcctgtatcagaagggtaagtgggagtcgtggctgggttctagcactggatgtgaccccaaactttctttgtaactttaaacaagcaatatgacttctgaaactatgaacaatagctcctgccttgaccatactaagaaacaaatgatataatgataacatcttacatttgtacaagaatttacaaaattcttgcgatcatctcatttcctcttagtagccaccctctggagtgaacattgttcttcccacttgagacagaaggaaacctccaggccatgctttacacagaatctagagtgatcttttttaaaaagcacaaaactgatcatgccacttcccagcttccagccctctaatgtcttacttctcgttgctcctgggataaaacccgactccctcaccatggcccgtgaggctctgctggagtcctctgtgcagcgtcttcccagctctctgagccccagcctcactggcttgctttcagcttctctaaggcatgtgctgctcttcctgcagccctttgcatccgctggtgctcttcctgggacatgtttgtcactccccacccattcacccttccttttccttcccttctccacttgcccaactcagagtccactcctcagcccaatccagatcagagctcctgttttaatcatcctagaactctatactttatatacacccatgttcaacatacatttacttatatcgttacctaatatcagttagctagacattagacttcatgaggagagggaccatgtttgttaatctgccattgcacccccagcctgggcacaatacctgrcagatcaggacagatcacgccctcaaagctgaataaagacctcattgatgttaacaagagtccaaagcagaatttgacccaaacctagtgacttagcccattttgtgctgctgtaacaaaataccacagactgggtgatttataaaaaacaaaaatttaatcctcacacttctggagtctggaaaccaagatcaaggtgccagcatctggtgagggcctgtttgctacgtcctcacatgttggaacacagaagggcggcagagaacccacatccacaagccctttttaagagggctctgccctcatgatctaaacacctcccagtggtccacaccttctaacatggttgcgctggggattaagttttcaacacatgagtcttggaggggaccaaaacattcaaaccatagcaaccatagcacccagggtagggatctagtgcttttgccaacatcccacactgcattgcaggtagcagaaatgaaaatattttccatgtataaagcaacatatacatgcaagacactgaaatttaaagaaaatacaatagcttctatgggaccacattaacttagatgtgaacatgcatcaaattgtaactctccctgaattgtaacatactcctgtatagaaagtaatatcaaattgcctcttttattcattcctggatagggaaaaatgcatggagtctttggagttcagtcccctgggtcaaggtatcagctctcttacataccaggtgtgagactttggtccttgtgtcattccctcacccaagcctcactttctttccttgtaaagtggaggctcctagtttctccttcatgggtttctgtgaacagactcacacaatgaatgcattcacaacaatgagaatttctccttccaccccacagacttctgttctgcgcagagcctgctgctcagtaataagtagaaaatgaataggaaaaacacttcggaaatccaaggctgatgatttggaaatgtgcctttgtgaagctgatgttcaaagataaaaactgttttgagcataaaatagttattttacagtccacttagttctcatatggtaatttcatacctgattttttttctaaaatatatactaatgtgtcaaatccatggcataatcttcttcgtatttactcctctttaaggcttttaattcttcgattttagtacacataaagaaaagccatgaagaggcattgatgacaagtattgattccagcctatgaaatattcccactgtcctttaaagttttaggtctttacaacctcaggggaaggaggagaggaggctgctctgaattcatacggtatatctgagaggaccagccctgtcctctctcaaggtggactggtttcagaagcagtgagcatgccctgcacttacatcatcccttcctcatcatccctcacccggtgctcatagcagtatcatcatgtaagcacaggaaaggaatggctgctctattaggagtcactgaaggctgagaccagcagcagcagcagctccagaatgtttacagaagaggggcttaagtgctggggtagggttaaagggggtcttagaggactggcctgaggccactttagtacaccaagcctcttggcttataaatggaggcatgtttatttgaactcttgagggggtgggagatgtggttgcagtgtctgactgataccattgaagcagcatttgcaaaagcagtaaaattctgctttgcttctttttccctgtactctctttccttaacatttaatatggaaaaaattgataaaccttcacctcaagtcaggccactgctagcccatatggtacttttgtgcagattagaaaaagatccccgtcttggcagacacatcagtgagacacacaggttggtaactggattcagtccctactcagctccttagccaggaatatttgtgaagtgcacaactgtagagctgtacctggcagccgtgcctcagaggcaggcctgtggcttcaggccccaggaaagggctgccttcactcagtggcaagggtccagccctggattttgaatttcccagcttttaagagttaactctcatgcttgcttttctgtcctgagcctctttcatttctgcttttggcagttttcttttttctataccacattatatatgatggacttycagaagtagaaaagagcaggccggtttccttggctcttccatctatttgtgtttggtacttggttgaatgtgtgcttttccagatgatgtcaccatgtctttaaatagtcctcaaatactctttgctaaaggcttttcaaaagacagtaaaatgtttctctttacctgctttggagcttagtactgtgattttaagacaaacaggagctataaaggctggcttttgagttcaacacgtttccaggaggcacagagctaggctaggtcactctagaaaccaacctggtagctgtcttctgcattgtcttggggaaattatagcagacagccaaaatagaaagggtaaaagtccttgggctaaaggattttcgaatattgtttcaaagtaagaagtgctgcatatgcagttaactgttgctgtgtcactgcctagatcttaatggcttaaaacaacatccatttattattcctcttggttactttggagggagggagggttggctgagcagttccactgatctaggctgggctctattgatctcagctcactcacacatctgcagtgggatggacagttttgtgtgtcaactttgctaagctattgtacccagttatttaatcaaatactaatctaagtgttgctgtgaaggtgttttgtagatttgattaacatctacaatcagttgactttgaggagagttcctcgataacctgggtgagcttcatccaattcattgagaagccttaagaacaaaattgaggtttcccagaggaagaaggaatttggcatatggcccgcagtgagagctcttgcccaacagtttccagcctgcccacctgccttatggatttcagacttacctaaccagcccctacaattgtgtaagccaatttcttgcaataaatctcataggcatagacagcaacataaataaacaacaggttctgtatctctgtggaaccctaactaatccatgtggtcagccgctgggtcagccagagccttgctgatctgggacggcctcagctgggatgacccaaactgtgctccatatggtccctcattttcatgtcctcatgacagtggcaggagcctaagggaggaaatggaagcatgcaggatacttgaagcatagccgtggaactagcatactgtaacctcttcctcattctattggctgaacagcaagtaacaagactggcacaggttaaagggtcgggggaaaataatcacctctggatgtgaggatctacaaagtgacactgtaggaggcaagaatgcaaggaaaagtgaacatctgaggctacagttgtcattgatctgccatagacagtttggtacaatggtgcaggaaaggacaaacatcggaatgttttgtaacttccaatatgcctttttcctctccttaagggagttaaaactatgaagtaaaatactcatagtcttaattttctcacttacaaataaaggataatgaagcttaccttgtggtgttagcatgagaataatgagatagctacaaaagcgtctgttgcactacctgtcaggagctcaataaataatgcatccctggccgggcgcagtggctcacacctgtagtcccagcacttagtgaagccaaggcgggaggatcacttgagctcaggagttcaagaccatcctgggcaacctagcaaaatcctgtctccacaaaaaatacaaaaattagccaggcatggtggtgtgtgcctgtaatcccagctactcggatggctgaggtgggaagatcacttgagcctgggaggcggaggttgcagtaagctgagatgatgccactgcactccagcctggatgacagagtgagaccctgactcaaataataataatattagtaacaacacatctctttaccagcaacacttgagcatgtactgcatgtaagaataaagaagacaaaatcaactggaggcacaggactggaaattttatttaagtgtctttgtagaatcaatattcataggtaaaaactctgttcaatagaaaatatttgtttgacaaatagttaagtcttatgtggtaattccaacaaagttttgaatttataggcaaaaaacaccttatgagcacaaacacaacccagtccccataatttgtcttcatgattttgaattttctcattttaatggcacatttagaatatatatatatatatatatatatatatatatatatatatatatatatatttttttttttttttttttttttgagacagagtctcattctgtggcccaggctggagtgcagtggcatgatcttggctcactgcaacctctgcctcctgggttcaagcaattctcctgcctcagcctcctgagtagctgggactaaaggcgtgtgccaccatgcctggctaattttttttttatttttagtagagacgtggtttcaccgtgttagccaagatggtatcaatctcctgacctcgtgatccacccgcctcagcctcccaaagtgctggaattacaggcgtgagccacagcgtttggcctagaagacatattttttaaagctggtgcccaggttttggaatcaagcagacctgaattcgaactctatctcacacactttctagctctatgattgaggcacatcccctaagccctaagacacagctttagatctgtcaaatggggataatacctccttcagttggctgctgtggtaagcaaattaaataatacaaagtaaatgtagttattgttattgtaaccatatagtatgatgacagaaacattcattcagggtttatagtgcactgacatgctttctaaattgtttccactgcccacttacttcacctgttcatgcttttccccactgcaatagtactgacctttattaaactagcactttggggctggttagagacctatcttctgcaactggagtagtatggagtttcatctagaaaccatagaacttgtgggtcttaaagcctatccccaaagatatccaatgcaaaggaagtatctgtcattggagtgccaaaggacatatggaatgccacataaggtggcattaacaccccacagcaaattaaattggtagtaatgaagataaagtcatcataattaataatgaaaaagcaagaatagcagcaaaatgcatccttcctgaaaactgttaagattgccagtttcagtatgtgtacacattctgtaggagcattgaacattgtcggccttgtacagcggccagattcttaagagaatgctgaactggagttctccaaagctctacaaacatgctgagttaagttatggattccaaatattcttaacccttaataacttatttattagattaatgataagtgccttttaaatgtaagccaaaaatgaaattgtatatactcataccagtattcacccaagaaaggattttgcaattgtgcataagttaagcagtattcagtgaacttgctgcctgccacctgcaagtaacctagctaaaattgtcataaacaattaaaaatgttattttcttccttacccacattttaaaggtagatgatcccagagttggtccagcagggacacaaggtcacatggggcccaggcagtttccctatttccatctgccctccttaacgcataggggatgcctccttttgtggtcgcagggtggcagtggtggatccaaacgtggcatctcacacaaccacttgtaaaaccagaatgggagagtgaggctgattctcccatgtgtgtctctcttttttaatagagaaaacctctttctcccaaagtcccccagaagattgctttttcacatcctcttggccctgatttggtcacagacccatacccataatgcaagggaggatggaaatgcaaggatctggcattttctgcatccaaaaagagaggtgggctctacctgcaagaaaagaagaggagggagggagggccgggcacagtggctcatgcctgtaatcccaggactttgggaggccaaggcaggtggatcgcttgagctcaggagttcgagaacagcctggacaacatggtaaaataccatctctactaaaaatgaatttttttwaaaaagactgggcgtggtggcacacacctgtggtcccagctactgakgaggcaattcttctggaggctctagggagaaatccatttccctgtctttttcagattctagttgcccacatcccttggcttgtggctccttccatcagtggcatcattctgacctctgcttctgttgccacctctcctctgactctgaccctcttgactctttcttagaaggacccttgtgattgcgttgagcccgcccagataatccaggatgatcttcccatctcaggatccttaacttatccacatctgcaaaatccctttggccatgtaaggtaacatattcacaagttccaagtattaggacatggacatctttgctgggggtgggaggattattctaccacagaactcagtaaatattggttgaattgttgcatgagcagtagaatctcagcattggaagcttcttggggtttttttttttttggtgttttgtttgttttgttttgtttgagacagggtctctgttgcccaggctggagtgcagtggtacgatcacaactcactgcagcctcaaactccttgtctcaagctatcctcccacctcagcctctcaaagtacttggattacaggcatgagacaccatgcccagcctcagaagcttctttagacagcacctaatctaacctcctacacggtctaagaatctcttgactgccagatagttaatctgcctccacctgaatacctctggtgctgggatcttccaaatctacacttccaggattggacagctacggacattaaacatttagacctttctaattgcctatgcactgatattacttctgcccttcttccttctggagaaatctactgattgtatcttctctatcactatttttactatattttgaaaaaagaagctgtcttcttatattcatcatttacaaatctttacttagcatgtctctgttagtcatttgggtgcaaaaagataaaagrcagccccatctttgagaaggattttggaaaaacgaattctgcacatatgtagttaagtagcaatacaattaaatgagatcatctacgtaaagagcttagtgctgtccctggcatacagcaaatgctccaaaaatgctcttgttgctcttcttaccactcacacatgctctgagccaaatggatgattcatggggagtttggtgagggtaaagtgactggcaaaggctcagggaggaggggaggtgtaagaaggggcagaatgtaaacaagctcaaggcaaaggggaaggcattccaggctggacaaacaataagcaggggtccagaaggcagattaaacgggtcaagctctggggaaattaatggactcatttgtctcatgtggagtttatcttaactagcttgggcaaaccagccagtactttataaatattgtcaatagtagctatagatagcaactgctcagcagtctctcccgaatgtctcctcctgagcccttctcaggctggtagactcagagtaaagcctgtcacctcaggcccccatattgtttctaatgggaagaagacttcttttgacctgcctctttgattcccaactccgacctggatatcatctttcattcctccctggctctatgtcccactgccactaactagctctgtctcactttccactcaggcttaccctctagagccttggggattgaacacagacattcatgttgaggaataatgaaagcaggagaagtagggtccaggtcagactgtaggcttcggagtggttgatggaaaactgttgcttctatgacagtgatgatcaagaagtgcttcaggctgcagggaaagcattaattagggtacagtgtgaccaatggaggaactcagaaggaagaggactggagaaggagttgtcagtcccttaagctctccactggctcacctcatctggacccaccttcccccaatcttacttccttcttaaagaaaggtgatgtgacaaaggatgatgcctctgggtgatcctttttctccctgaaaacacacaaacacacatataatgtgttttattcttttatttatttatttttgagacagagtctctttctttcacccaggctagagsacagtggtgcaatcacagctcactgcagcctcaaacacttaaattcaagtgatcctcccacctcagtctcctgagtagctgaaactataggtgtgcaccatgtctagctatttttttaacttctttgtacagacggggtctcactatgtttaccaggctgatcttgaagtcctggcttcaaacaatcctcccacctcagcctcccaaagtgctgagattacaggtgtgagccactgtgctcaacctagtgtgttttattctaataataaatctgattttccattttgctaggagtctgtgtgtgtgcatgtatatatatatatatatatgtgtgtgtgtgtgtattctatatactccatatatagatatataaaggctccatatatagatatagagagaaatatatatattactcagggaggtggggaggtagaaggggcagaatgtaaacaagctcagggcaaatgtatatatatacatatatattatatatacaaatatatattatatatatgtatatatataatatatattatatatatacaaatatatattatatatatatgtatatatattatatatatacaaatatatattatatatatatatgtattactctctctgtatatctatatatggatcctgtatatatgtatggcacctaataaaagttaagagacaagccagtgtgctctgtaattcccagtgactgaagctcagctttgccattttatttctgttttacaaggaattagaaaacaaagaggtaaaggtcaaataattccttggcaagactagtcagatgtgactttatggccaacattaactttacatgaaattaaaatgggaactttgccccttcctttaaaccaccagcctgacaaagctcytcttaacaatggtgctacatttggcatctgaagacaagatcaaagtgtttcataatcttctagcagagagttgagttgaacacgtatttgagatgatgaaaaaaggaacttagagaaaaacagtgagaaaatttttttctttaaaatttcttattagagacactaatattgcaatttatatgtaagagaagaaaaataccatttctcctagagaactaggtctgttaaagcagtttatatagagaaactgcaatttaatacaactggaaaaagttagcctagcatctaccacatttttttcaactctgtttactcagttatacaagtactttacagcaagcagacctctaattgtgtagttcagtgaatgagaaatgggacttgctgcggaataaattctggggtgtaactaaattacacaccatttcccatactttttttctttcaaattgcccattactttaaatgaaaacatgstttagaaaagaactgtaaccactcaaaatttctsaaggaccagtctcccttctccctggtgataaaatgtacttatgtttgtatttttcaacattctcctgctgaagttccaagggatttcaaaacttcattcacagttttccagtaaaacctgtaaaattcattttcagatcattggtttagcatgatccagcttcagctccacttttagcaaatgaatccatcttcgtttctattcatatgacaccaggagcatttctaacgatgcccctccctgctcaccatactccgtcatcctgcacttatgtatcatctcacgccagccgggtcagccggaggaaggcagaacatgggcttggggaattgggaagcccgacccaccagggcatcctgcacaagttgcataagctttctgagcttcagtttcctcatctgaaaaatgggaaacatcaaacttgcctacttcctagtttttttctgagatcagatgagattgcacatgctgaaaacactctaagtactactgaaataatagttccagtaatcattttctaaaaytgtttaatgtgtgaggtgttttgctgttttttwaaaaaaaaaaaacaggtataaggaaagtgcaaaaaaattcattttcaggtraaaagatgaggaaatagcctgatctatttttgattgttctttttagtgtgtgtgtgtgtgtgtgtgtgtgtgcgtgtgtgtgtttctgagacagggtctcactctgtcatccaggctagagtgtactgatgcagtcatggcttactgcagcctcaacctcctaggcccaagccgtcctccagccttagcctcctgagtagctgggaccacaggtgcacaccaccatgcccagctaattttttaaattttttgtagagcagggtctcactatgttgcccaggctagtctcaaactcctgggctcaaatgatcctccctccttggccttccaaagtgctgggattatagacatgagccaccacatctggcctggttgttctttttaaattattattccatcctattaagattctgcccctcaatgaagtgaacccttccaagaacttacacgatatttttttgctccacctctatccccaccactctgctattacttcctgtaaccagagagaagtcactagaccaatttaaatagaaatctaggaaaatcctcatatgctagcatttcatggttcatgattcttccagaatttgagttattctgtttagtactcattgaggtaagaaaaaattagaaaagactgctccttacattatcttagagactaaggaatcacttttaaatccttttttcttttttctttttttttgcattttgaagttatctatgttcagtgtcagaaaaacaaagtctcctttttttgcagcattcatttgtgaattttagagcaagaaattaatcttagctgtaacattttaatgtcaagtaagcccctttctcataaccccatttgaagttacacattttgctaccatgaaacacacatgctggttaatacaaacaagttactctgaactgggaatacacccccaaaatgacctattacttctttctccttctcaggagaactttaattttgtggcctccaaaagcatttttaaaaaccaaaacggtttaaggaaggacggtgggcatatctgaatacatgattgtcatctccaagagcagtaagaggmtgctgctgaggaagcagaggttagtgtcagagagctgacttcaaagttcagctcacctcttgtgccatgggaagcccaggcacatccccatcctgtgctccctcagaatctcaactacaagttcctcatccatgaggttgcagtgagggtccagtgagatcatatctgcaaacaggcttgcaagctgaattatttaaatgtcagcttcttatgatgaggtgatctgtgatatggtttggctctgtgtccccacccaaatctcatcttgtagctcccataattcccacatgttgtgggagggatctggtgggaaatgattgaatcatgggggcgggtctttcctatgctgttctcatgatagtgaatgggtctcaggagatctgatggttttaaaaattggagttctctacacaagctctccttgcctgctgccatccacataagatgtgacttgctcctccttctcttccgccataattgtgagggttcttcagccacgtgggaccatgagttctccattaaacctctttcctttggaaattgcccaatctcaggtatgtctttatcagctgtatgaaaacaaactaacacaatctactgtggcaatgccacagaaattggttctgtcaccaggagcagtcactatgctgtaatcaaacccagttgaagaagatagtttcttaaaattggtgaacccatctgtgagactaagttgttctattttgatctccctcatttaaaattcaataattcaaggaaatggaaatgactagacatgaatatcttaaggtggtgatgataggcaccctgatcctaaaggaaagcacatayataccccaattagccactcttcatacaaatgatagtaccagaacccagccttgcaaaagtagtttttttttttttgcatatacacctacacagggaaataaggttgaatgtgggttccttttgccctcctaatgggtcttgattgactggaagatgagggatagagaccaaagcaagtctstaatccaaatctgcagttttccatagccagtaatcccactttgaaattttaaatgtgtcccttcaatagaattctagatttctcctcatcaattaccaacatattacccaatctatagcatcaaaatgaggtagcaacctgaaattgtctttttttttttttttttttttttgaggcggaatttcgctcttgttgcccaggctggagtgcagtggcatgatctcagctcactgcaacctccgcctcccaggtttcaagggagtctcctgcctaaacttcctgagtacctaggattacaggcatgcgccactatgcccggctaatttttgtatttttagtagagacggagtttctccatgttgatcagactggtctcaaactcccaacttcaggtgatccgtctgccttggcctcccaaagtgctgggattacaggcgtgagccaccgtacccggcctgaaattgtcttttggtgttagtgggtttgctgcagcttctcccaccttaacagtattaatcacagcattgcaggctgtgccttggcgccccatacatgtgagtcttaaaggtcacttaaatcaaatgtgtgactatatttatactctctctctctctctttgtcagttcagaagatttagtatcccacttcatgtacctcaaaacctagtttaatactatggaaagtcacctatgtcccgttgtgcacacaaagcctaactccataattcagacttaaggtgacaaagggtggactagatggagcctcaacacagaaaaaggccagaacacaaagaggcacccacagacactcagagtggtggctaatgggttgagtcttctcaagtgatgcctcattgaagaggaagctccaaggcgactgagcataaacacctgatcagacrtctcctgaataagsctacagcctttggttccttgtccaagtgacattctgaaattaatgcctttcatgcagaacacacccaacatttgaaaagtaacaagatttagtgcttacaggggctgtttggtatctttttcaccaaaaccagaagtgtttcccattcaccccgagtgtgtgtgtgtgtgtgtgtgtgtgtgtgtrtgtataagatgccagattaattttgtttacaaaatattcacattggaaccatgaggtttattgagagtccctggttacaccctccaatcaaacatctcattcacctgggctttcatgtcagtgcaccgcattcctggtgagagttgatgacagttgcatctatgtcccagcagcctgttcactattgatgaattaatgaaaataaagctggggctcatgtgaaacatttgagcaagtgtaatagaaggctgtgaataatagctgtggatacaaataggtcagactcaggaagcctggcagaggtcagatgggcccttttacagtgggatgcactgtttcaggaattcacattaaccacgatcagactccccaaacatgatagccatgtagaagaaagatctaatacagcctagcctataaggtgggtataagtctgataatctaacaataatattaaaaattgagggagaggactccatggtttcctctcaacattacctagatagattcaatagctgtttgacaaacaataagaagatttagattaaacaatccttttccaggaaatactcttgagcctgttctatgcagctgcaccttaggcaaacttattaattgcttcaaataggtccctgtcttaaatccaaaattccctgagaatttgggaactcctcaaggtccctgtcttgagcagtaattgatatttttcccctagaagcagagcctgagacaagaattctcatgcaagtgcattattagggagccctctgaggagaagcaggatagggcaggggtaagagctaagcaaagatgtggtcctggctccatcctaacttcagcctgagaccayggtgagctctggggctcagcttgcaccatggattcatcccagcttgaggcagggagccagactgtagtgggcccttagcagcagttcggtggctgggtgcctggccaggtgagcagaggagaggggatgcccctacactgatgagaccaaatgcatagcagccatgcaaagtggtaaaagaagtggttctcatcccatcctgacgtcactaaggacatgacggcatggccatgggcccttcgcatgacctctctgaacatcagtttcctcatctgtaaaatggaagagtgggtggcaggattggattaggtgatccctaaaytccaagctctgaattgcggtaatttcaacaagggaagtggtggagaggcttgttgaggaataattgatgttttttctattcacagaagagaattcattaatgtaaatgtgtccctgaatgaccactctgttaatagctcttctcttacctggaatagcactgaatgcacaggcaactcyaagaagatgagcagtaaaatttccctgaaggcatatattctaaacaggacrgcaagaatctgtctttaaataaagtgttttgagggcggtttacctcaagggagtgttaatacaaccagacaacctcatttaactgactcaggcatcaaagtgaattagaggcaagaggccagcataaagcacaagccagaggctgtcccttcaaaatggtacaacctctgtggggagcagtttggcaaaattcgatcaaaattataaatacatttactctttgaccatgcagtcccctctctcgaaatttagcctgcagtatgaaatgatatttatgccaatttactcactgtgccactttttccaaaaaaagtttgagactggaaactactcactgatccatcaataaaggactaattaaacaacaacaattatggtaccacatatacaatagaatgctgtgcaactgatgatatttggtactgagaacattctgtacttatatggaaatttctccaggatacattgatcagagaaaaagcaagtggaggagcaatgtattatagaatagtattatatcgtaaacacatatgcatgtataataaaagtataatgcttttgtataagaagtggagatcataatatctatttatgttcacatgtatccctggatatctagaagtcatttttgtttgcctcaagaaaaatctgtataagtggttacctatgaggggtgacagagtggagaaatgatacaggtgaagacataggtgagagtgagagttctcacctagtgcctttttataaaatgtttttctgaatttttttccaaccaccatgggctactccataaggaatagagcatctgtttgattaaattattttttaatgaaaactttaaggtaggaatcaataaaaactgatcacccctacttcctttatttcatgctttggttcggggattggcaaattatggctaaatagttgccctgtaggggccgggcacggtggctcatgtctgtaatcccagcactttgaaaggccgaggtaggcagatcacttgaggtcaggagtttgagaccagcctggccaacatggtgaaactctgtctctactaaaaatacaaaaattagcgcagcacggtggtacatgcctgtattgccaggtactggggaggctgaggcccaagttgtttgaacccgggaggtggaggttgcagtgagccgagactgcaccactgcgctccagcctgggcaacagggcgagactatgtctcaaaaaaaaaaaaaaatggtagttgctacaggggacatgttgctcacaatgatgaaaatagttactatctggccctttacagaaaactgtttccaaccccagctttaaaatttggagttactcataaaaccgctgtgatcacacctaccactaagcttctgataccaaaggattttgtcttcttgaagtcagccttcctgtccacagatagtttttgcactttaaaaaaaaaaaaaaaaaaaaaaaaaaaaaaaaaaaagaggtgagatactgtactggttaagaagagagcatgtacttgggacagatgacccaggtttaattctgagctctgtccctcactaccctgtcacctttggaaagttaacttttagaattctcagtgtctttgtctgtaaaatattgtccctcataaaattgtttggaggtgcctccctcttacagttgttaggaagttcaagtaggccagtgttgccaaggagttcagcaaaatacctgctgttattattatctaatattgtgatttttttaacagggtgatgaccagttaaatgtatttggagaggacactatgggaggtgagttttccttactgatcagatcaaagttgtcattttagtaactttgaccatgcctttttaattaaacatcaacttgagagaaaaaatattaacagcatcactttttccttggccagggagcatgattaagagtagaactctttgggtctttcctgcctccatccatgtaaagaaccaaaggggtgcattgctaagtgatgcatttcttaactgcccagagaacatgattcccgagaggctcagcgaaaagaggatgctctactcaaatatctttgaaacatgcttaacaccaactccccactggaagatccaagtatataatagcatccaaagctcccacaagtcctgcagtaaaaagagttgttaaactttaattcaacattcattaaacataattgaaacacaaaaatatttttcctgcctggtagttactattccacgtgtacctttggaactcaacctaccctacaccaggattatactgctttgtaatttttgtcatattaaaagttttgcaaatggccaggtgcagtggctcacgcctgtaatcccagcactttgggaggccaaggcggccggatcacttgaggtcaggaattaaagaccctggccaatatggtgaaaccctgtctctactaaaaatacaaaaaaatttagaaaggcatggtggtgcacacctgtaatcccagctactcaggaggctgaggcaggagaattgcttgaacccaggacgatgaggtttcagtgagccaagtttgygtcattgcactcttggcgacagagtgagactacgtctcaaaaaaaaaaaaaaaagtcttgcaaaaagtaaaaattccacccataactagctatgcatgtaactgaaaatagatatgattatgtgaatttgggactatccaaaaaagaaaaggttcataattgtcctaagtaaaaataccttctaacatatctaccctgtaataaaagttataatataagtcatggaaatatgtttatagtattgattctaaacacatataagtaagtgatttagctttttaaataaccccagctctaatcctgcacagatccatgagcacaaggtggtgggtaaagtgtcatttgatgataatggcaagagcagtatgtgaaaatcacagtcaccaaatgacatcttggtgattcatgaggagaggtacaaatatatgagccataacttagctgtcacttagctaagtgcaaataatcaacttggtctcaactggataggggatgactgattgcctaagaaattttctcttttattctagttataaaattaacacatactatagaaattttttaacgtataaaataagagccatttaaaaccttatgacataaattatcatggttaacattttggtacatttcattccaatgcattgcctatatatctatttttacatagttgagaatgcatgtgtatatataagtatctccaaatgttttgtatatatcacaacataaacatgttcccatgtcattaaaaactatatacttaatttgtaatgactacattagatgaatgtcatgtaccatcattcattttaaaacaactattttttaaaactgaaataggatacaatcataccaaaaaaaatcacaataataaccaggaccattttcctagattgcaaataggctcagagttcctcagcttcgtaaatgtaaactcacaggctagagaacctgagatgaccatctggtyccacatgttaggaacaccagtgtatctgcctttaatagaaaactccaaacaatgtaaggtgtttcctgtcaccatgggttattctgtaaagagactggatttgatttaaaaattctctttgtttgtttgttttttgttgtggaaaccatatggtttcaacgatcccaaacttacttctatcctctgtttccagctctttctcctctctttgtccccaacccaattcatcatgccccatgctctctctttctctggtagagttggggcttcactcagctgattgtgaattcctacaaaatgtggtatygtgcatataaatgaactaccccaatttcactaaaaaatgtttcctgtcagaataatgatctaactttcaaaagtagttatctacagaaaatatgaactgctgttactcagatacatttattttaaaaggaaattttatatcactaccttaaatgtaaaataacattatttgctctaagtgaaactattttttaaaatattatttcccagatactctacttgtgttttaaccatctgtatataaaggwagcttagcaaatgttttaaatgtgaaataacaccaaactgagatagttaggatgatttaaaagtaatttttaaaaatagctttctttgtgattcatgctattaaatgacgtaaatttttgccaccaaaakttgatcgtgcatgttaaaataaaaatacattaccggggtgggggaataagactgaaataagcagggcacggtggctcacacctgtaatcccaggactttgggaggccaaggcaggtggatcacttgaggccaggagttcaagaccagcctggccaacatggtgaaaccccctctttaataaaaatacaaaaagtagccaggtgtggtggcatgcctataatcccagctatccaggagcctgagacaggagaatggcttgaacctgagaggtggaggttgcagtgagacaagatcgagccactgcactccagcctgagcaacagggtgagaccatctcaaaaaacaaacaaacaaacaaaaacactgaaatggtcattggtgcctactaattgtagcctattcacacatttattcaacttcaagctttttatcaaataaaactacaaggtttgggtttttatataatatgagtaaaaccagggcttcagtacagtttttcttgccaataacttaagttattcttattttaaaggtttcatggaagatttgagaaagtgtaaaattattttcataattggtgagtaacagcccttgcattttctaacaatacaattgctaataataagaatttggtagtgggccaggtgcggtggcttacacctgtaatcccagcactgtgggaggccaaggcgggcagatcacgaggtcaggagatcgagaccatcctggctaacacagtgaaaccccatctctagtaaaaatacaaaaaaaaattagccgggcatggtggcgggcgcctgtagtcccagctactcgggaggctgaggcaggagaatggygtgaacccgggaggcagagcttgcagtgagccgagatcgcgccactgcactccacctgggtgacagagcaagactctgtcaaaaaaaaaaaaaaaggaatttggtagtgaaagagactatttatttctcatcctgttttgaagtctttttggtcaaaatagtaccccaagttttccggttatttctttcacgtatgcagttgtatattgctttgggatttgtatcttttcagcatggaaaaagtagggcttgaaagaatgtcaaacttctgagtttagctctacaataacaaagtgcattaaaaaggtaagaggttgtcatgtattaaaatctaacacacatcttttcagtttaaacactgaccccctcyttcctaaactgaatgcatcaattgcctcatgttcaaatatagctcaatagccagatcctgattctatacagcaaacagtaaaaactrtctaatttgctctttgctctagtacagtgaaacttattgatggattaattgtgggagaaaatgtgtttgaggtttaccaacattttctgagcacccactatgctccaggttatctcaattaatccttatacaatcccattacctagtctattcctattacatatctattacatagacaagaaaaatgagactcacaaaggttaaggaatttgtccaagattatgaagctaatgagtgtgtgagggccagatttccagttttcctcatggaaataaagggaactagttgtgcagtagttaaaaatgcataaaaaaaggacaaatattatcctttcaaaacttagtactttttcctctaatcattcaagtgcctcaaaaaattagtacacctacctgtacattttccagaaaatgtctatttatattcagaaataatgaaaaggtccacacctcctcaatgagtgggaaaagaatggttgtcaacactacagaaatataatcagataaacttaagactcttgcaagttaagatcagagtgcctccttggaaatctctgggtaaagttctctcattgttagatgaggaaactgaggcccagagaagttaaggggtctgatcacagtcattcaattaactggtatcagggagaggaccagggtctctgactgtagttcctcactccaggcttctccctcctctgccaytcagttgtgttggttgttaacctgaacgcaagctgtctcacacattcagccatctgacacatgcttattgactgttggacccctgctgggcagtgaggagtcacagagctgccatcttagatgaagagaataatggatatatcattaaccttgaaaagtattaggaaggaaccaaagagctgaaatagggaacaacctgggtcaagtgtttggagtaaaattaggtgattactttagagagggtgaccagggaaggcttccctaagaatgtaacatttaagcagagagataaaaggagagatgggcccagtgaagggatgaatgggaggtgagaggaggcaaagagaacagtatgtgtcaagcagtgggaattcttgagacctaccttagttccagttgtcatctgcttacctctagctgaccttaactgtggaaactggatggactcttcccacacttattttacgtttttttcagaaagtaaaactatatattgcttatatctcttattgaagagtaacccaatgtcataattgcaaaggaaaattagttgtgctatagattactaaaattcccttttccacataagttttaataatcaattttcctggcatccagaccatacacagagtcttatattttctattcaatctttatattaggagccaagttaggaaaaggggagaccctttaaacttgacagctaggaattcacagtaggagcctgtattagtcagcgttctctagagggacagaactaatagaatacatatatacatataggaatttattaagtattaacttacgtgatcacaaggtcccacaacaggctgtctgcaagctcaggagcaaggagagccagtccgagtcgcaaaactgaagaacttggagtttgagggtaggaagcatccagcatgggggaaacatgcaggctgagasggtaggccagtctctccttttcacatgtttctgcctgctttatatttgctggcagctgattagattgtgcccaccagattaagagtggatctgccttcctcagaccactgactcaaatgttaatcccttttggcaacagcctcacagacacacccaggatcaatactttgtatccttcaatccaatcaagtccacactcagtattaaccatcacagagccctttattatcacatagaaatctgtgtttttaataatrtggtccaaagaagcttccaaaaataatacagtatgttttgtggtggttgttactgtcttggcagtaatattacttcagatttatccattgtttaacactcacagttgaactgtgaaatgcgttgtcaaatgccacttccttctctctaggcrtaactaaagacctcacctgttactaagtcctgtgcccttcaaaaggtcaaacagcacagtagaagatctttggaattagacaaagctcgaaacctccaagggtccacagaccaccctctaagaattgctgcactgagcaaaagatttttcttctatctaacaaaactctcctgtatttcaatttactgatcagtcactcttctagtaaaagagatttcagcttgctgtttgggccatagaaggtacaaagccactgtgatacaagggaaaacgactgctcttcttctactgtacatactgractctgagaattaaggccttagttctaaatatgtccttgacaggtggcagaatggtattttgggactgctttattgtaagtcaatttaaccttatgaaaatattccagatgtcatagacacacccatagctgttttgatgagttcactttcagtgaaacagagtggttttgtctatttgagaagatgactggattgtcacttttcaaattattgtcttggcatatacccgaaaaacattggggctgcagtattagccagagtctaggttgacatcctcactattcgccttaagacaaaattaatatgcctaaagcattcttcccctgttttaacatatccattagatcctttttgtccacagaaaggtccagacttcttagactggccttctggtctttcccatttcccgccacactcccatgtcaatctttggctccagccacacctgcrtccttattatcgcttgagctkgtcgcactttgccagccctttcacttgaaatgtcttctcccctattaatcatgccccaaggtcagggttaagttctagctccctgagaactccgctgtaatcaccatccttcctcctctgcgctcctcctcccttgtgtctacatcattcatttgggtactacttaatgactagaacaacaaatatttgttggaataatgaattctttaagaagcagtgtggtctgtttccataacaaccaaaattgcaattggaattcctggcctagaactgacaagcagcttgttgctgctgtggctgtttcttgcaggatggttttcatgttaattaggagcctaatcagatgctcctttctccatgaagctgctaccctctcactgagagcaagcaaaagcaacttttcccctgagctggtgctgtttcttgctcatttgcagggcagtagtcacaggtgggagcaggtgatagccctgatggtcatctgagtggaaaaaatgttcagggcaagtgtaccatctgcaccaaaggggaaggtggcaaggacggacccagtccaccctttgaataatgtgtgactatatattcttgttcccgaagaaagcagctcagtagctgtttataaagaaatacttttcaaaaaacaaagaagggattcccacagggtaggaccagatgatccaaaggattgaaaaagattctatggacttcagttgttcacatacaagatataagaacctgcactgatatacaagacaggagctcaatcacttctgaaaactgaaaattatttggaaaatgtaaaaatagcctttaaagggcctcattatgtcccactaacaggttcctacagtttttcacaaccttttctggtacatttctttccttttttctttttttttttttttaaatctcttgatcattattttgctatgagcccatttattctggcgtctttttcccttctccatttttcattgcctgcctatgcccaaaatgtgacataatctaaattcctactaatttatatccaaagcttgggtagaagtgctccaatttgggaaacacatctgacttttcaggtgaggtatggtattaacaacataatgatcaagacatcattcaaaggccatagctttcaatgtgtctgggacacacgtggcctggtgtacattggcattgatgctgtgataaactgtttttaagtagtgaactttgggaggtattttggcaatattttatgttaatttgtgcatttttaaccactacaaaaatagtcctatctattttcctaaggaaaactggagtaataagaatttttgcttaaaactcaatattgcaatgcctggcactatttcattatagccatgttgccatttcattattgccttattattaaaaaaacatgaattgaattttttttttttttttttttgagatggagttttgctctttctcccaggctggagtgcagtggtgctatctcggctcactgcaacctccgccttctgttttcaagtgattctcctgcctcagcctcccgagtagctgggattacaggcgcctgccatggcgcccggctaatttttgtgtttttagtagagacggggtttcaccatgttggccaggctggtctcgaactcctgacctcgtgatccaccggccttggcctcccaaagtgctgggattacaggcatgagtcaccgtgctcagccatgaattgattatttaaagtatctacctgctgcttaacatgagcacttttgatggaattgacccacgtatttggttaaattaaatatgaaagaactcggattattttaactcagtgtagctgtaatagcagtcaacatttattgagcagttaacacgtaccagacactacataaagcactttataatgttatcttattgaatgctcctatccatcttctggagtaagcactattactctcctgatttttcaagtaagacattagggagttcagttattagatactaagtggtggatctggaggttgaaagcatggatttttgcaaaaawcactgcctgttgtttttgttttttcttgaagtgacaggctttatttattttcaagaaaatttctgccagattctcaagtctgaaaaaaaccacagttcgtttgttagatgctctttcagaaagtagatacagtgttcacttttaaaagcaactgattcagctacttaaataatcacacaagtgcttttcccaaaacaaaagcaaaaaccataggtgtgctaaagggccttatgcgtatttcccattttgtcacacaaaatattaaaatgatgtgtgcttaagggtaaaaattaaataaaatgtgtcttttttactgcttcatcaagggcattcttatgtaacattggcattttctttcttttctctgttttttactgtgagtacatggtaatgaagcacacaactagtacagcaggactaataacactgytgccgtgcaccacaggtttacaaccattgcttctgcaccacctccgaaatgctaatracctcttagtgttataatgaatataggggacctctaatgtctgtggaccacactttgagaaccaccaccatggggttacttgggggttggggtgggtgtgttgagcacatacataggacagagagaaaccccagatttagcacttagggatctcaaagggaaaaagttccttgtgcctttccaagcaaataacctcaaaaatgtgaggaagatgtcagggggaaaatagcgcatctgctgaaagccctgtttctctgggctcctgtaggcctggaaaaagttctgagtgtttctctgtgcccagtagtgcaagggataactaaaaggaaagtctgtgcacttgtcagaagaagacaaagaggactgtagcaggaggtcccaaagcagggggctggatggaaggtggagggggtacagcctaggggagcaacagcaccaggaagaacgagaactgaagggagggcaaagaaaacctgcaaggtgggagaatggccctgacatggagactgaactttgaactggactatcaaggttatcagaaatcactggattggactaagaaaacccagactggatttgattgtgtttccactctgaagtgaaatcrggcagctcatgagctaggggcaggtgtgatggttaattttaggtgtcaacttgactgggttaagggatacacagctagctggtagagcattatttctggctgtgtctgtgaaagtatttccagamgagattggcatttgaatcagtggactgagtaaggaagatccaccctcaccagtgtgggtgggcaccatccaatctgttctggctcagctagaacaaaaaggccgaggaaagatgaatttgctctctctcttctggagctgggtcatccattttctcctgcccttggacaccagcagccccccccaggttctcaggcctttggactcagactgaactatactcccccaccttccctgttcctctgcttatagaaggcctattatggaactccttggcctctataatggagtgaaccaattctcataatgagcccatatgtatatatgggcttataatgggaataataagcaacaggatatatacgtccagtcgcttctgtttctctggagaaccctgacacatacagctgggatcacctacaaaataagttgccatctgactctccagcctttggcctggcccaactggagcactgttccagctccaaacacagacaccagatctccacagttctttctctcctgaagggatgcagacacaagggcctctttcacactcttccaggcccgacacctgtattttcaaagtccaggccattcaggatggtagagtaaagaaaaagagacattggactactttccaagagaccctcaaatgcatttaccaactaatgagatatctttctaatgttggagaaatgtgggcattttgtggtgacaatgaacctacttaatgatacaaaccttttcactgcaaaagggttccaagtaatgttgaactagaatgcaatgcattcttcatttaatcaaagcaaattaataagcctttatcaagggyttattatggtcaaagaaccgtgaaattcaaaaagacataaaacagtccttgcaacactgcatgacatggcaggaatttaggactcatctagaagggcaaattactgctaaacagaaaagagcccaagtacatgaggttaccagtaaagggaatggaggcctcatactcattgtgtccctacccattggttgaaatctttggaagcactattaattcaccagctgagtcacctgatgaagttttaggtatttggcctgttcactaaaggctaagtgtattcaaggaaatggccaatgttccttgtctgtgttatcctggttattgattagcaattgagttaagggacatctccaggctgactcactgagagcctcttttgcttgtttagagagccactctgaatgatcagggggcagtagcagatgctgcaggatctagcaggccccagcactggagaggagagaatacccaaagtcttgtgtttgtatccaagttctgtgtacccttgggccaaccccttatctcctctggatttcttttaaaataacaaaatctctgtcaactccaaatttgagcgactaacaagttaacacattgttaactgttctcttaattggaaacttgtacaacagagacatagcccaaggaagtgaagcatgaaggcaattaaataagtcaaaaaccccatcctctagcctaaaatattcatttttattacctaatagcaagattaaaactaacatatactggtgacttactgtgttccagatactgtgctgtcttcatatgcagtatcttttttttttttttgagacggagtcttgctctgttgcccaggctggagtgcagtggctctatctgaactcactacaagctccgcctcccaggttcacgccattctcctgcctcagcctcccgggtagctgggactacaggtrcccgtcaccacgctcggctaatttttttgtatttttaatagagacggggtttcaccatgttagccaggatggtctcaatatcctgacctcgtgatctgcctgcctcggcctcctgaaatgctgggattacaggtgtgagccaccgcaccyggcccccatatgcagtatcttatttartcctcacaccagtcatcagcactcatattcttccccattttacagggaagaaatggaagaaatcaaggctcaaaaaggttaaataactttcccaaggttacacagttaataagtgacagaattgagactcagacccaagtttctcagacatcaaagcccatgctctagaagtttctgtaaaagcaaggaaaccaaaatgtaggtgaagttgtgggaatatagtgggtgagagacgtttgccataattatttgaataagtactgcaattttctgttttactttgckcctatgtatctagccattggtgtctgaaaacaaaggtcaaatacgatagcaagtgaatattaatgacaaagacctctgtctaccccagccatgtttctctcaagtatgtaaaattccattttaacttcaaaacaggaaacaatttgaacccataaaagtaccctaaaccatcactgaaagtacagtgattttagaatttatgctatgtcttttaccgtaaagaaatagcataggcacttgttttgtgagcactgccaaaactacttctgagggccattggcagcaatcagcaagtgtttgagcgtgtgatgctgagtgggtctgagggaacctggtcatgctgagattttctctgtgggtgggatggagaagctcccctgtatactgatctcaaacagtggcctagtatggaggtggagggggaaaatcctacacaagcagatatatagacttaaaggggggtgcttaaactccccacatgataaagatattctctctctgctatagtacattcatcygttaggtatatatggctttgggtgaattttgttagttcatttgacacatttattgagtttctactatatatcagcaaaatggcagcctaaggatacaaagatgaaaggcaagtcttcccagtctaaaggagctcatgttgtagggaggaagccaacaaatagcacagcttggcacacgcaatggcagaggcacaggcaatggggagcaagactgaagtagggatcagagttgagagaggaagtcrgagctgagtccaaaagaagaaaaggaattggccaagtgctaactgggaagaaagtgggggtgagcctaaggcaaggactgagggaatggtgtgtgcaggaggcagcctcagagatgagatggatgggaagtggtaagagcagagctgaagacaaggcaaaatctgggtcatgagagactgtgatcccaggagagatagtatgaacttcatcctgtggcagtgaggtgccatgaaggcttttactcagtgacacatcatcagcttccaacttcagatggagcactctgccaaccaggacaggaagcctaggcttcagcaggaggtcagccaaggtcatcagaatggtcattcaggtaaggaaaaaggagacagttgaggtgaaaaaagaaaagcagatccaagagatttaggaggcagaatcaatggaccataaagatccattatgggaacaggtgaatgaaaggacctgagcatgtctcagaagcagctggtttagacagccacatggatggaagtgagaggtgaagccagctgggcttctgggttgggtggggacttggagaacttttgtgtctagctaaaggattgtaaatgcaccaatcagcactctgtgtctagctaaaggattgtaaacgcaccaatcagcactctgtaaaaatgcaccaatsggcattctgtaaaatggaccaatcagcactctgtaaaatggaccaatcagcactctgtaaaatggactaattggcacgctgtaaaatggaccaatcggcactctgtaaaatggaccaatcagcaggatgtgggcagggacaaataagggaataaaagctggccaccccagccagcagcagcaacccactggggtccccttccatgctgtggaagctttgttctttcgcttttcacaataaatcttgctgctgctgatcactttttgggtctgcactgcctttatgagctgtaacactcactggtggcttcactcctgaaggcagcaagaccacgaacccactgggaggaacaaacaactccggacgtgccacccttaagagctgtaacgctcactgcgaaggtctgcggcttcactcctgaagtccccragaccaygaacccaccgggaggaacaaacaactctggatgtgccacctttaagagctgtaacactcactgcaaaggtctgcgtcttcactcctgaagtcaagcargaccacaaacccaccggaaggaagaaactccggacacatccgaacatgtgaaggaacaaactccggacacaccatcttcatgaactgtaacagtcaccacgagggtccgtggcttcattcttgaagtcagtgagaccaagaacccactggaaggaaccaattccagagacagaagtgccatgcaaagagaaggaatttgcagaagaaatagagtttgagagacagatgagtttagttttaaacttttttgtttgttgttgtcagcctttctcacccaggctgaagtgcagtggtgcaatcatggctcactgcaaccccgacttcccaagttcaggtgatcctcccacctcggsccccggagtagctgagactacaggcacgcaccaccacgcccggcttatttggtagagtattttgtattttcaccatgttgcccaggctggttttgaactcttgggctcaagccatccacctgccttggcctcccaaagcactgggattacaggcatgagccactgcacctggccagttttaaacatcttaagattgagatgcttatgagatatccaagcagtgatgtacattaaacaagagatttttcacagctgacaccaaaaatacaagttctggctatagacacagatgtgaagccatgtgtgtgcaagaagtcacccagtgaacttagggagggtgaggctggaagagagctaagacctgaaaccttcccaagagccctgccagagccagaggagaagagcacagggaggaaagggggatatctagagcaaatggcatcacagcaggcaagggaggaaaattttcttctgggaaaggttcactaaagtataatgaaaattgtctgtggggtttggcaacaggtgagttattggtgactggtgacagcagttccagaggaatgggaaggggtaaagccagacggttacgggtgactaggaagtaagtaaatggggatctgtacagacaacactttcaagaaagttgactctgaaagagtctgaaagagactgtttaaagcaaagtgaatattcagggtggaatatttttaaaacgagagactcaaggtcatttttataaagagggaggcattacaggctctagtcaaaagcaacactacatgagttcgaatgtcggctcctacatgtacagctgtgtgaccttgggcatcatccttccactcactgttcctcagtttcttcacctgtcatgtgraagtattgattgtrtctaggtcatggggttgatgggagagtgaaatgagttagcacatgcagcagggctcctagtgaatacaaacattacctgtcactgtaggtactctatgcagagtgaagggagacatccaatgagagggagagagtcttgagaaaaggaggatgaggatgggttcagaagtgaattggaacaaggaaaggaacaagatgaggaaaccataacagaagtttagaggttaaattcctgtttgtttcctcaatgtttcttcctcaacatttcttgttaaaattaaacactccctaagggactgagctgttaagtggtgtttcacctacaaccagctgtagttggctgagatcaatcagttgaaatgagaatgtgtctctgaagccctgggcttaaacttgcctatatgctgccatttcctctagctgacacattcttgcagttgtcaacaacccagccctgtaggagaccattttaccataggagatcattttttgccttgaagaatgaagcagagtaacaagccagtgattaaggagtcagtgactattttggccctccaaatgtaacactcacraagtatttcctttccaacttgctccaggctcctctgaaccaggagtctgagtgttttcttagctgcaaatgaaaacatatttaaaccaaccttcaggtggttaaggcaaaaaaggactctttcctcttgtaacagagtgtagctgttttgctttactgtgacatgttactgcgactcaggtgatattttttctcatatttgtctggggcactgactctgaagatgttcctcctggttctgccaggctgcagggaatcccttcaactaggaagtggatcacgcgttactgccacgcatccacccatcaccaccggcccagcgaccttggtgtaaagtgcattgaacctatttgggccagttgcgtatgaccctgtttggactattgtagtcaatgcagggaaagctggtggggaagagccacaagcagaacaccctggtttttttggaagtcctcagcatggtctgggtggagcygttgaggcaagcactgagactgcctctcattccaacatctgctgttgagaaaggaagagaatgttcagcagtgagaaacctggccgaggccagccatcagactcctagagagaccccttgggaacctcttcagaggacgatttgctagaaggccagtgatagccagttgattggaaggtgacctttactaaatctcctagatgacagagaccatgccctttttccwttttttttttttttttttttttttttttttggtttgcttctgcagcacctatcaggatgcctggcatttagtaggcattcagtatatgtctttagaatgaatgaatggaaaatgatgaaagctcagattaagttacttccccccaagttcctcaaactcaggtgtgactaatacagacccattatcagaagcaaatgtactaatctgtcttccagtaataaccatctcagagccataatgataagagcagaggcttgaggtaaaacaatgaggcatggctatttttaagaactaaccataactaagaaactcttcctctggtcctgaaggatcaatgcggagtctttataaagtctttatggccccttcccacaaaataaataaaaccaaaaaaagagatacagcttttggtaaatttggcttagtaaagtagcacacggtttccgtattagactcaggttttagtccaccattaggtagctggcaccatgaggaagcaaagtcaaaatacaaaacagataacagttatattgatgatacaggtcccaaatgtcaccatccttcaaagaatggagtgtgtactggagttgatgtgttgataaagtgtccattaaagacaaaagaaggcaaggcacggtggctcactcctgtaatcccagcactttaggaggccraggcaggcagatcacctgaggtcaggagttcgagatcagcctgagtgagcaacatggtgaaaccccgtctctactaaaaatattaaaaaattagccaggtgtggtgggtgcctataatcccagctactcgggaggctgaggcaggagaaactcttgaacctaggaggcagaggttgcagtgagccgagattgcaccactgcactccagcctgggcaacagagcgagactccatctcacaaacaacaacaacagcaacaaaaaaacaagcaaaggctgaattatccatcgttgtgataagtacagtgaagttcgttttttgttttgttttgttttkttttatgttcctacccatcccagaacctataatctgttcagtgaagccagaattcatgcttatgaaaacttcagagcccatacagcgcagtgtagaattaactgaaaaagaaccattcggtgaaggttaccaggggtaagaggacaaagaaaccacaatggttggagtctcttcctagaaaagctgagaaycgaggggagtctcaaagaatggatgggattccctaagtttgagagagggctgaggagagagggattgcaagcagggagattccaagttaggagcaaatcacagcagtagggctatgcccctcgtagcccaggaacgggaaggagatgggccaaaccttgaaaggcctagatgcatgaatgtgatgttgactgaagaccagtccagagctggtgagcagggcaggcaaggaaacaccaggaggacaactgccctccacgaattctcccatatacagtcatgcatcacttaacaacaggggtgcattctgaggaatgcctcrtcaggcaatttccttgttatgagagcatcctagtgtgtactcacacaaacctagacagtgtagcctactatgcgcctaggctacatggtatagcctattgctcccaggctgcaaacccatacagcatgttaccataacaaatagtataaatacataataacaccacggtaagtatttgtgtatttcagcatagaaaagacacagtaaaaatacagtgtattataatatcatgggaccatcctttatgcagttcatcattgagcgaaatgttgttatgcagcccttctccttttacttttttcttttaatactgtccatgaatgtaagggtggaaggatgcaaatatagaaaaaggtttacatttaaagtagggctcaggtcaaacaaaattagagcccttgtcttctagtcttctccaaagaagaaagaawcctgaactaaaatatyagccccagcactgcacaacatcactagatagtgtaaaatcagagactgtgcctatttcactcactcctgtttggcaggaggagcacagagctcaaagagaggttagtctagcttaattccctaatcaagtcaagaagtgagtcttgaacatcactgacagataactatctagtcttgacttcagtattttgagtgtcaggatattcactatcctattaataatagatgactaataacaattgccccacttggaactttgaatcagttaggattttgtttggctgaaagtttttaaaaaaataactgmagttaaacaaggtagaaatttattttatgtaaattttaggtacaagcagtcatagcagtggtatgacatgctatggcctcagagactcaggttccctatatttttctgctcctttgagtggcttctccagagttatctcatgtcccaaatggttgctgaagctccagcccttatgtcctaagcccattaaaaaggaaagaggaaatggggcagaagaacttgcttcttccctttaaggacctgcctggaagttgcattcaccagttccactaacatctcattggtcaggaggacactttcacctgcaagggaggctaataaatgtagtccgtatttcagagagccttgtgcccacaataaaaatcatgaggtttaattttttacaaagaaggagaaagtagataacatgtttctatgacagagtctaatgtaggcctcctcctggaaaaccaggaaaagtggatttggcttttaaaaaaaaagttttgatttttaatcttccctggtaggaccatgctcaccaaaacaataggaagaagatgctcatctgtggagtggctgttaccaactatgtccatggcagcagcagagtttagctgcacctcccagaggcctacagtttactctcaaagtgagaacatagcaagtaggcagaagctgcacccctgcttttgaagtccttcttttggagctgcccaacaatccctcttggactactcaccaaagccccaggaatgccaccccctctcacaccctgctgtggtataggtgaactcaggtggcactgtcctagccttgagccctagtagaagacgctggctgcatccacttggtctccccagcagaggagatggtgtgtttctattgggcatctgttgtccataggaaagtcttcctaagactgcgtcaaaacctgctctgtcagaaattccaatatttaggcatttctgtctggtgtcctaggctctatatctagtacataattaaaatcacctatcaggtttttcaccaaagataaaaattgctgagagttaacattgtaacatgtaattaagactactaaaaaccatcagtttcacatgccaggcctgtgaggaagtgaaatgtgcttttagtaaaagattataagaagatacgggaatgtacatttttgcctagtttagagggctaaaggattgttttaaattagatatgataaacctaaatgtttgagcaagttttggaaggtttgtgaaaaattaattgtaaaagagattctgtgtatgaacatattggctaaatttaaaggggtattattcagttttttccatgcttttggaataaagcacaacatggttttcttagagcatggatctgctctttaacaagaatttgtaaagggttataaaaggtttatgagaagctcaccttatggttaaactgattaagactggatagatttgtctataaggttttattaaaaattggggtggaggccgggcacagtggctcaaacctataatcccagcactttgggaggccgaggcagacggatcacctgaggtcaggagttcgagaccagcctagccaacatggtgaaaccctgtctctactaaatataccaaaaaaatgagccaggtgtggtggcrggcgcctgcaatcccagctactcagaaggctgaggcaggagaattgcttgaacccaggaggtggaggttgcagtgagccgagattgtgccactgtactccagcctgggtgacaagagactgtctcaaaaaaaaaaagaaaaaaaaatggggttgaaaaaaatktttcactgtttagtctagtcctgccatacagagaaaattagctttctctccaccctgccgattcaaatatttgaagacatatacacttttcttgtgatttatgtcttcatccaattaaaaacatgcagctttttctgttgtaaattgcaggttcctcaagagcagagtgctatcttcttgtctctgtgtccccagtccttacactgcctagcgcatgtgkattcctcacattttcttgtggaatgaatgaataaattctacttttattatttccccctaagtcatgtctctttagacacatgcagcccaaatctctcctaaaacagattggcgagaacatttttaaatttaaggatttcttttctttttacaaaaaataatayatcttcattctagaaaacgtgtatcaacaataacaaaatcacaaacagcccaatacctgggaatgaatactattagtattttgatttatattcctcttagtttttttctgtgtatatatatatttttttttaatatacatttttcatcagaatgagatcatataatttaaaaacctactttttatacttaacaaaacctcatgggcatctttccaagatagtattcctgaatatgccatgtcattttttaaagttcttttgtaattcaaccgaaatacaaaaacagaaaagtgcacaagtcttaagtattctgtttgatgaaatttcactaattggacgcatgtgtcttaccaagatgaagatcagaaaattgaacgtgaccagaacctcagaaatctcccttgtgtctcctcctcatcactactccctgcaaggactaccataggcattttttaacttccatagatggaatcacactatataactgtatatattattttctagctgtcttctttcagcacatcattttaatgactgcatcctattcctttattttgctgtaatagaatttattcagtttatacctatgattgtgttgtcataatacattattttttcaacttttgcttttattaaaaattctgtaatgaatatctgtgtcctaaaacagtgatttttttctcttacggtaaaattcacagatatgaattaaacttttaagatttgtttacttatattgccaaattgcccttcaaaacagttgtgcccgttttatgttcccatcacaatgtgtaagacttccagtttccgtgatgtggtctagaattgaacataaaacctcagatgtaatccagctaacatttgccctgaatgtctcacttccctttactgtgcacaaatagactgcaagcacagataatctcgaagttctctgacaaagacaaaagttagggtgatagtgctggaaatgaccttggaacagtaagatacttattttccatcaacaagcttattttcagatgagaatccagaagcccaaagaggtgagatatcagagcagacagattcccaaagaaaaccaaactagaaaaccacatgtaggaaaaaagcagcagagaaacaaaacaaaatgtgtctttagcagttacctatggggagcgaaactatttttcttcttctttttacttttctgaattatctaaatcttcagtaaggagcatatatttctttcccagtggagaaaaaaagtatttctttaaaacaagagggccgacatggtggtgcacacctgtaatcccggcactttgagagaccgaggcaagtggataacttgaggccaggagttcaagactagcctggccaacatggtgaaaccctgtctctactaaaaataaaataaagtaaaaaaaaaaaaacaaaaattagctgagcatggtcttgcatgctgcatacctgtaatctcagctactcaggaggctgaggcacaagaatcacttgaacctgggaggtggaggtggagatggcagtgagccaagatcggcagcctgggcaacagagcaagactccatctcaaaaaataaaataaataaatagaaggaaaaatagaaaggaggaggtaaatttgtaatttcctattctatacacttaatatatgcctaagacctagtacaaagtaggctacaaagtaggaaaaatggtgtgtttaaaaatctggaagaggcagggcactctagaacaatgaattccaagaattcagaaacccaggcaagcagaacctgagtgaagtgacttttgaaaagcagctctggtctgtcaatttggaaaaataaatgtgcttgatgagctgggtctggaacaggcgctggagacctctgggtgaagaaacaaaggatcggtgtttggttggttggttggttggttggttggttggttggttgttttttttcattttttggggtttttttaattttttaatttttctgtagattcatattcagctgaaaggacaagtgatttaatggtgttttcttatgagcagtttggaaatcttgtctgtgtctctgttcagagatgggggtagggtgaagatggggttagggtgctgtgagctgtaggaggtcaccagcttcatggggtaaaaacatttcagaaccaccaccaacaggcaccaggaaaggtatctgccctttcctgtcacctgagacctgaaccttcctcattttctgtccatgtaagagctggagtcatggcatttggtttcagagtcttgattaatgagggatttcacatctcgctgtggctatggtgggtgttggctgaatgaattgtaaaatcatagagtgttagttagaacatagatgaaatcacatccctaaagtctactattcattgttaatggggccgggcacggtggctcacacctgtaatcctagcattctgggaggctgaagcgggcagatcacttgaggccaggagttcgaaaccagcctggccaagatggcraaaccccatccctactaaaaatacaaaaattagttgggcgtggtggcacaagcctgtaatcccagctattctggatgctgagtcaggagaatcgcttgaagccagaaggcagaggctgcagtgagccaagatcacaccactgcactccagcctgggtaagaggttgagactcagtctcaaaaaaaaaaaccacatagttaataaataatggggcctgataaggttgccagatttaacaaatgaaaatacaagagccatagttagatttgaattttagataaacagtgacatggcctttagtctaagtctcatgcaggatttgactgggtgtcctgtattttatctggccacctgacggggccatgatgaaagcccagctcccagtgaccattccagtcaactgcaggctgtgcagtgcatttcccaaaggaggtctgtctgatttccagaaagacaggccagaagtgccccacatatgagaggctgtagagtttaatggtaccaggacacagttggcccttggcatggtttcttcatcttgttataggattacaaacagcacctgtttcaaatagctgttktaagaattaaataattacaagtagaacacataaaacagatatttattagataaaatatcaagccaaaagtattgtgacttttatctgagtagtctgcaatgacttctcaaacatatttggtctctcaactataccactggtgtgaaataggccacagttcccctactattctctccagctttatgctgagaaaaccaaaaattcctctcatctgcaagagagaggtatggccctgattttgataaggcaataaggatttttattaaccatcataataattawtcattcatgatagaaccattatcttagcattattacgttgtaaatataaaaagaaaaatcaacaaagacttcctgcagtgacattggagagttcacagcaaattgccttccttagattatctaatctagaagttccaaatcaggctaaccatcagaatcacctggggaattatccttttttattatgaaaatatttcaaacatacagcaagctgaaagaatattacagtgaacacttgtatacccaccacctagtcttcaatcaacatcttactacaagctgagtatccctactccaaaaatccaaaatccaaaatgttccaaagtcctaatctttttgcatgccaacgtaacgctcaaaggaactgctcattggagcatttgggattttgaattttaggatttgggatgctcaactagtaagtataatgcaagtatcccaaaataaaaaaaaattaaaatataaaacacttctgatcccaagcatttcagataaggagtgctccaacctgtatatcttgtcttgttatttatctgtccctctattcatccatcagtacatctctttttcctgtccacttccaagtaaattgcakatgtctgtacactttccctggggaattttctaaaactataagttcccaagcctcagcccagagatgtacagatctgctaattcaggaatttttccaaacaactccccagcttcactctggtaaccatgctgatggagcccttattagccgaaacattaccagtctcatggcaaagggaaaagacctggcataccatgtgctgggcgtaaaaacctctgctccaaaccagtacacatccrcctctgcccacatttcattgaccaaaacaagtcccttggaactcttaacttcaagaagtttggggcaggctgggcacggtggctctcacctgtaataccagcactttgggaggctgaggtgggtggatcacctgaggtcaggagttcgagaccagcctggccaacgtggcaaaaccccgtctctactaaaaatacraaaaacagccaggtgtggtggtgggtgcctgtaatcccagctactcgagaggctgaggcaggagaatcacttgaaccctggtggcrgaggttgcagtgaaccaagatcatgccattgcactccagccttggyggcagagcgagactccatctcaaaaaaaaaaaaaagaagaaggtggggatgagtaatccttccacaggcatggggagaagcactatggaaggaaagctgggatatttaagaaagtaatacaatctaacacaggaagccactcatttaattcagcttcttcactttacagacagagaagctagcacccaaagaggcaaagtgactctcccagaatcactcgactagttcaaagcaggagtggtcaagagccaaggtcccctaattgactttcttgtcatgtacagggttgcctctgtgaagctcacagatagtccatcattcattcactgatatactatacacgggcactgataaataaggcatggtttctgctatcaagacattcccagtcccatttaaagtttttccatataaccttcagctgaccctggcatatttccacatattcaccaaataacctgaagcagtcagtgcttttcagaactaataaagatgttgtctttgaggataaagatctatttatctcaattgttttcggtccaagagtgtcagttcccagcarcagcctgctgaagcttggcacagtgatgcagctcttcccagatggagaaggtttcaactgacccatgggcccagaatggttgaggatcattcttagggcacggtcagttcatgatctgatggcataataatttttctcagaaaagagtcattcggtcacaaaaaccttaacccaacatagggacctattttcatttagggagaaagaaatatttcaacaggcagaaatatgatagatttctaaaatatgaagattagaaataagatagtttgatttgcaaaagatatttgatcctctcacaagctgtaactgggaaggctatgcacctttaaaggtgttaaaacagtaccaggatataaaactgctgtgtccaacctttgtaagctcatggaattttactgggagtaagttagaaagagttagaaagacttttaaacatcaccaacagtagctgcctcattttgcagataataattatgatgtttattgtgtgtttcactttgccagctaccaatccaagagattcacatgcattattttgtcctcacaaccaacaggtattgtgaccacccccattttgtaactgaagaggttgaagctcagagcagatatgtgacttgatcaaagtcatctaaccagatggagaatggcctgaggtgtgaacctggaactcaagcccttgggtccagtgatccttttatgtgaaaggagcagagttgtcatttttgtggggccacaggctcctggacactggctcttgttaacaattgtctatgacactgggccaggttctgtggggatgccagcctaagtgaagtggtttctgccctctgcgagcttcagcctggcaaagaaaggaagagaacgtgagcaaactgtgtgtgctagaggccagagaaagagagaattttgagatgttggtcgttggtgttacagagtcaaaggtatcaaagactagaagcaagccaaaaagtaatatgacaaatatgcaatcactgttgaactataaaagagcaatttcagartgtgatgaggtatgagatagtttccaagaggatagggagtcaataaatgaagaagaaatggaaacaggcagttttccgctgctaaaaaaaagaaaaagaaagaaagaaaaagaatacaaagataactcagaggacacacgcaatggtagaaatattttcatttggactagggagaaccgagctgatgttatacagaagaaaagatgccaaccgagagaaatatatttcatatggacaaaaaagagagcgtcaagttcttggaacaggcaggagaggatccatttatcattaaattttttagtctttcagctgctattataaagtgtctattatatttcaggcactgtgtttgtgcaccatgacgagcaaagcagacccagatcccatactcagataccatagagcctaataaggaagacaaaattttaagtaaataatatatatcatacatataaactagatacatgtatctgtacatacatatgctttatctattaatatattttatatgtatataatttccctgctttgtctcctgtaaaatataatatatatatttacattatatatatttctattttatttatattcatatttatattttacggggccaaagcagggaaatcatatatatagtaccacaatagctggtaaaatagtaccacagtataaaaaaagctgcatccaacctttgtaagattatggaattttactaggaataagctagaaaggtttctaaccatcaccaacagtaactgcctcattttacagataataattctgatccttattgtgtggactggggaaaactgagcatgacattacacagaaaagaagctgccaaccaagagaaataaatttcatctggacaaaaaagagggtatcaagttatctgtaatatatgtatgtattttatgggagccaaagcagagaaattagccttaagctaaatggcataaagttttccaaacaggataaagaaggatggagggcaaaggatagaaacatcaatgttttgaaaatgctgaggaaatgagacagtcttcatcttagtgagtaagagggttaaaaatgttaagagtgagaggaatgaggatgtgttgaaggacagtgggaaatattagcatccattcatggacatccaattgatgtccaacttgataccaggagaaagaaggatatttgccaagaagcattaaaaactattatgaagttagatagcatgactcagttggctcagtttttggactctctcaagggaactcttagcagcccagagtagatgcaaataaagcctatggtggcctgggcagggagagcaggctgatggtgacacggcaggttccatagaactgaagtagggcaaaggattcaaagttgctagaaaggggctggcgtccagctagctagggaggtaagtggagctcaaagggaatgggccaaccctgtgaggtcataacgacagcaaggaacaagttgagaagtgaggtcaagggaaaagtgaaagggagagaaagatgctatcagagtgggagaatagatccaaataacgaacgctcagtttcagctagagctgcagggggctgaaattgggttagtgatgaaggtcattggtgctgaggaggcttaaatacctctcagactggggtggaataggaattaaagcctagaaagctttgttgatagcaattaaacccagacaatactgttctctctgctttgaaacttagagaaaataaacgttgagttctaaactagatacgtatatcttcacatacgctgtcacatatatacgtatgtgtgtgtgtgtgagagagagagagacagagagagagagagatcgtgcacacacgggtatatcttaagtacctgcaagtggcctggaagtctggaattaatggctagttcccaaattcattactgactttggattatgtttaatttaaaccttgatgtgccagacaacgtaactcaggaagagctatagaggtgtataaccccccttcattgtaaatagcttttgccaagcaccaatattttaacagagagatgggaataggaacatttttgttgacatttgggggaacgggacaaatttcagagactttttttttattatactttaagttttagggtacatgtgctagttcaaccattgtggaagtcagtgtggtgattcctcagggatctagaactagaaataccatttgacccagccatcccattactgggtatatacccaaaggactataaatcatgctgctataaagacacatgcacacgtatgtttattgcggcactattcacaatagcaaagacttggaaccaagccaaatgtccaacaatgatagactggattaagaaaatgtggcacatatacaccatggaatactatgcagccataaaaaatgatgagttcrtgtcctttgtagggatatggatgaagctggagacttttcaaatgtagacttgacagagcttggcaactgatcaggtatgggagatgaggagggagaccctaaagtggaatgaggcagaaagttggtgattatttccccccattttacagataagaaactaagattcagagaaattaaaagattgctctataaccacgtgactagtaagtggtggaaccagtgttgattgtcagatcacccatcccgtgcccttcatgatacttcatactcctccacttccacccctgtgcagatgcagagccctttcatgctccaagttccattactgaagacaccaggctcagccttatgccatctttcccacactttccttgtgctggcaaaggtgattaattacccttccccttcctaaggagtcccagccagtgcttctgcgatggtgtttacagsccccactcatagaacctatcacactgctgtgatgatggttcccctgtccatcctccccactagattgtgacctctctgatggaaaagacccagttctgggtctttttatttctagtgcttagcagtgtcaaacccattctagctgtccaatagatgtttctttaaaaagagctgtgttaattaacttcatgcttaattccaggtaacatcctggagttagtaagatgcaataaaatgtcaacaaaagtcattttaggccagscccagtgactcacacctgtaattccagcacttcgggaggccgaggtgggcggatcacttgaggtcaggagttcgagaycagcctggtcaacgtggtgaaaccttgcccctactaaaaatacaaaaattagccaggagtggtggcactcgcctgtagtcccagctactcgggaggctgaggcaggagaatcgcttgaacctgggaggcggaggctggtccttatcttaaggagtccagctcaggatgctgaatccaggagctatctcacaggagaggattgctcctgtcaatacaaagcaaactggaaaacgtgacccacgtgggcatgccgaggtgatgcagatggtttcagttctacttctcaaagaacaccaggtaccgaagagaaggcagacttagactccctgggctggcaattcccatacagtctctcccctcccttccttctgtggcaatgctgtcgagacctgtagggaaatgacttactcagatgcaaattgggcgttcacagtacatgcacttttcacaatatatagcacctttggcctcacagggaacgctttttacatttttccacctttttttgaggtattcacagacaacttcaaaatagaatctcatattccacaatctctttgtgaatcatatcacgtggtatggtgtatgggcttattcaggggttcgagccttgggtaatggtacactaaaaatgagtgagatgacagtaaatgtgacagctcctgtctgtcatcagtcgtcttgccaccagaggacacagcccactcattctgagatgcrgttcctcaaaatatcttttgccgggtaacaaattatcctggagggatatcaaggccccattgtttttttatttaaaagtcataagttaagacctcaaagatatgtcggtggcagtatatgaaaatttatgtttctaccagcagtttttgtgctttcactgcagtgataaaatcactttgtttttcagyttggagccaagggaagaatcaagctattgtgtagattacttaaaattccacagtgcctgcgccatttggccaaagaatgctaaaaatttgcagctgttgctcccacgaaagtttctaactggggcagcggctgctgttcaacacacagctgttgttaatttgagctgaagatttttaattgcctttgtgtcgagatttattaaataacattttagaggaacaaaaactgtaatagtcatattagcaggatgctaaaggaagaaaataattggaacatggcatttttgccttgtaagccaagtctgaaaatatcttttccacatggagggctcccaaccatcccaggaaaagcatttccaggtaaatccagccacagaagccctgatggccttttcaggagctcagccacttgcaccccttagtcatttacctggaagcaccacttctccagagtggccaccttgttcccacactctccattcctattatactgagagacgggaggcatagtgcttacagtaaacatagcattagctggcagttggctgcttctttaagtggtctgcattattttggggagcctccataattgctgttttcctattacatccagcccatccctgactccctgacaatactatgaggggtctgacctcctccccatttggcttagagcagytgtatagatgagcagaagatagaaaactcagacctttcctggattttctggcaaggcaaagaagggggaaggaggggcccttctattagaaagggtcaacaactaatgttgtcccttaagagggaagttgccaaccgcacaaagaaaggagttttaagtatgaaaaaaggcaaaccaggaaaaccgcagaatgagttgtaaatcctcattaccatactaaaatttcaatcatgttttgcatgctgatggtaaatgtttccttttagcaagaaaactttgtcaggcatttatggtgcacttacgatgtgcaaagtgctgtgtgatgtgctcagggcacccagagaagcttgcagggccggcgaccagtgagggagctgcagcccaagagtaagacaggcagggagcacccggcgctgtttacagcattggctccaacagagctgagggtgagaggtctggctcctgccagaagggggaaacatgtgatctggacctaagggctgaggacgaccttgatcattaaaaaaaaggatgaatgtgaccgggcacagtggctcaggcctgtaatcccagaagtttggcaggctgaggtgagaggatcgcttgaggccaggagttcaagaccagcctgggcaacatagcaagagaccctgtctctacaaaaaatctgaaaattagctgggtgtggtgatgtgcacctgtgggacccgtagtcccagctaactcaagaggccaaggcaagaggattgcttcagcccgggagttttgagttcaaggatgcagtgaactgtgattgtgccactgtgctccagcctggggacagagcaagaccctatctcaaagaaaaaaaagaaagaaagaaaagatgaatgggtaaaaaaatgtgctagaatatagaatattattcagccataaaaagacagaaatcctgccatttgtgacaacatattggaagacattatgctaagtgaaataagccaggcacagaaagacaaatactgcatgatctcacgtgtacgtggaatcataaaaagtcaaattcatggaagcagattgtaagaatggtggttgccaggggctagggaagtgaggagatgtggttctggagacctcatgtacagcatgatggctacagttaacaacactgtattgtatacttgaaattagctagaatagatgtgaaatgtcttcagcaccagaaaaaaaaaagattatgtgaggtggaggtttattaacttgattgtggtaattatttcacaatatatatgtatatcaaacatcacattgtacatcttaaatttatagttttatcaatgatacctcaataaagctgggggagaaaacaaagagaagaggaggaaggaagggcctttcaagctgaggaccaagaagaacaaaagcgtggtagcctggaaaagtctgtgtgggcataggaggccattgaatgctatggaggtgggagtgccctcctttccaggcacatggaaagcattgaaagtccaagaattgtgttagttggacatgacagtgctggaggagggtaagaaatggggagaggggcccggcacagtggctcatgcctgtaatcccagcatttcaggaggctgaggcgggtgcatcacttgaagccaggagttcgacaccagcctggccaacgtagtgaaaccctgtctgtatcaaaaaatacaaaaattagccaggcatggtggtgcgcacctgtaatcccagctaattgggaggctgaggcaggagaatcacttgaacctggggggtggaggttgcagtgggctgagatcacaccactgcactccagcctggtcgataaagcaagaccatctcaaaaaaaaaaaaaaagaagaagaagaaatagcggggaaagatgctggagaggtaaagtcggactagattctggagagttggggtgctgctgtagggaatttgaattttactctgggagcataggaggccattgagtgctatggaggtgggagtgccctgctttccaggcacatcatcctgctagcaagtctgtggggctccaaagcccctccgattctgacatgcagaggtggagtgattgccatacgccaggcggagaagatgaggacctgaagtgtggccaggtcaatgtggccacaatggggaggagagaagggaacacctctgagagtcagagcccaggcttcaaatcctaggcttgctactcactagcagtgcagcctaggcaatggatttaacttctctgtgcctctgcttcctcgtctgtaaaatgggaataataacagtgcatgcctcttaaggttattttatataaccttgtacrtaatacctaaaatgtttagaataatggctggtacagtaagcgcttgataaaggtcagctattattattattttcagacataaaatcctatgacatactattatgaaagggatatggcagatactcagaattgataatagctaaggaaaaaaataagrtaataaaacatattgagggacattctacaaaataactattcataatcttcaaatgtgtcaaggaaacccacagaaactgttctatactgaaggaaagcagaaggacatggcaactaaaggcaatgtatgatcctgaacttgacccattgacttcagaggacattattgagtcaattgggacaattcagttgaaatttgtaggggtccaaggatatcattatgatggaggatatgcttgtttccttgtttgtaggaaatgacactaaaagrttctggagtaaagaggcatccaattagcaacttattcccaagtgtttctgaaagttctttgtcctcacaacccttctgtaagttggtgattgctgaaaataaaaacacttatttttttaaattaaaagctagcatttgttgagcattcactaagtatcaggaattgtggccagtgctttgcacatgagtgggttcggttctccaaggaaacttttctgactttgcatctctaccaaaacggagccaagtacccctcctctgtgccccgatagtaggctgtactcatcttcactaactgcctgtgaccatgggttacaagtggtctatgaaaagtaactgcttgtttttctgtaacacctgccccctcccgcttcatggataatctaagctctttaaaggcaagggctgcatcccattctccacttgcatccaccactctcagcacagctcctggtatagcaaatctcaagttcccaatacatgcttagtgactggaacactgaggcttgctcaccatggtgactaccattaaaaatgaggcaccagacttggaatgcatgtctgacacatgacttcttttcaaggtggtcctggctctggcaaaggcacacagtgtgaaaagctggtggaaaaatatggatttacacatctctcaactggcgagctcctgcrtgaggaactggcatcagaatctgaaagaagcaaattgatcagagacattatggaacgtggagacctggtgccctcagtaagcaacatggcctgacccacattactgcctttcctgtctggggagacctttggggtttttgtaatgaatctgagctgctggaactaagaaacccaaagaaacaatagctgtatattatttccctcctttgcagcaatccagatgcaggcaggtctacagcagacagaccttctactcaaccaggtcgagctggcccaggctccttccatcttgttgctctaccaggccctcaaatgttggcctaatttcacatttttcccctaaattcatcccactttagaattggaaaggcttcaaaatagaagtgagtgtggtgcagcagagcctagaattagaaacccccagaaaatataaaataatgctttggtttagttctgggaggtatgattatcttgaaatttggtatcttcttgtgtaatttaagaatatccccttttctatcttttttcttctaaagtcaccatccatctctaagaagctgaatggtagggatatcaagaaatattcrtccctgccacactgggtcccatgataggctctgtaatgagggccgtatgatacagtctctgttagcaacagagctgtctgatttctctataaccagctgcactctgtttcccacctggaagccagaatggtcctcatgaaaggaaaacagaccattacagctgccacttagctggcctcctggagcccactcttttccctaaagtctcctcttttcacagcagctgttaccagaaaggggtcccaatccagaccccaagagagggttcttggatcttgtgcaagaaagaattcagggcaagttgtaaagtgaaaggaagttcattaagaaagtagaggaataaaagaatggctgctccatggacaaagcagccccaagggctactggttacccattttatgtgttatttcttgatgatatgctaaacaagggatggattattcatgcctccccttttttaccatatagggtaacttcctgacattgctgtggcatttgtaaactgtcatggcgctgatgggagtgtagcagtgatgacaaccagaggtcacccttgttgccatcttggttttggtgggttttacccagtttctctactgcaacctgctttatcagcaaggtctttatgacctgtgtcttgtactgacctcctatctcatcctgtgacttagaatgcttaacctggcagggcgcagtggctcatgcctgtaatcccagcactttgggaggccgaggcaggtgaatcacgaggtcaggagtttgagaccagcctggccaacatggtgaaaccccatctctactaaaactacaaaaaattagctgggcatggtggcgggcacctgtaatcccagctacctggaagactgaggcaggggaattgcttgaacctgggaggcagaggttgcagtgaaccaagatcacgcctctgcactccagcccaggcaacagcgtgaaactccatctcaaaaaaaaaaaaaaaaaaagagaataccttaaccttctgggaatgcagcccagtaggtcttagccttattttatccagcctttattcaagatggagttgctctggttcaaacacttctgacacagccagaatgatttctttgaaacatttatcaaagtgtgttattcccttcctcaaaaccttccaatggctgcccgccacacttaggatgaaatcagagtcctttctgtagctctggcctccagctccctctccagtgttatttctcaccactctcaccttgctcactcccacccaccactagcctccttgttcctcccacaagtcagcctgttcctgcctcagggcctttgcatttgctgtgtctgcagcctgatgctctcccttcatacagtcacatagtttggtccttgacttcatccagatctccacttcagtgttacactttatcagatgccttccctgaccaccctatagaaagtaacacctctagcattctgtacctctttgtcctgctttaattttrtacctatcagttatcttcgctgactcttcattatatatttatttgttcatctatggtctgtcttcttcattagaatataaacttcatgaggacttcattcacrattatctagggatagattctaaccacacttgcaatggccgcattccccaagcccctgccaaaagccagagagcccacgaaaagggaattcctccactggcagctgattgcgtttttcctctrccaatttccagactctggtgtatttctcctacttcatttaccatagcacttgctaaatacaaattttcaacaaagaaagtgatgttacttgaaaatgctactttacatctacctaaagtcttttaagtcagtagatgtcaaattttataaaatatttactggaaaaaaagttaacagtaagatacctttttttttttttgagacacagtctcrctcgtcacccaggctggagggctgtggcaggatcttgacttgctgcagtttccacctcccgagttcaagcgattctcctgcctcaacctcctgagtagctgggattacaggtgcccacggcaatgcccggccaatttttgtatttttaatagagatggggtttcaccatggtggccaggctggtcttgaactcctgacctcaggtgatccacgcacctcggcctctcaacatgctaggattacaggcatgagccaccgcacccggccagtaaaatactttttataccatgttttgtctagttttaaattgccattatgcctaattcatggagtgctaccatatgaaatgcagctaccttacctcatctaatctaagatgccaatattttaagacagataactggtaagaatataccagtaagaaaaaaacactaacaattaaactatgactcagaactgattataaatacctgccaatttcatagatattaaaatatggggtggaggtggaagagtgaaatgaaatatggtcaattgctgtctgctgttaaccttacctgaaccttcctccctccctcagtggatgactgaaggagacttggggtacttctagtgttctgtgaaagagctcaggtcctgaccactctcgctttgctccagggcatcgttttggagctcctgaaggaggccatggtggccagcctcggggacaccaggggcttcctgattgacggctatcctcrggaggtgaagcaaggggaagagttcggacgcagggtgagtggttgttacgggcatccttccagaagaaaaataggggacatccttgaggttgggtgataattcaaagtctatttctttcccaattacattaatgaaaactttaaggggcagaaacttgactcaaactagaaatttaaaaaaaggagatttattgacttaagtaactaaaacacccagcagtggtttagatttggttgactccagatatccaaatgtgttcatcaattgtctgactctctctctctctctctaattctctttcctttgtgttggtctcattttcttcctgatcaaggcttaccttctaccatctaagtggcttcatagaaaagtgtttctgtttcccagtgggtccagcaaaagacccagagttgtgtttcctatcctggatttggtcacagtcccatcatcactgaaccaattactgaggccgagagggaagaagagggaatacgctggctggcccagcctggaggaccaaggaaggatgggaagggaggagggagcaagggcaccacacctgaaccacacagggaaggaaaattacccccaggaaaagtagggctgcccttacaagaagacgggggaatgggtgctggacaggcagaatcagaactacacaccaccctcccactatcctcccaccatcccacctccctgcccaccctctcctagtgaggagggtgggtcagggatactcacaggggagcagcagtaagtaaaaaccattgtggctgccacgtattgaacccactctgggccagatcctgtgcccacactttatagagagtacctgtaatcttacaagtccaggcaagaagggtaaaactggcctcattgttaaacaaatactgacttgagaacttaaaagaaattcatatttatagagatatctcttcagactagttttgaaacatttttcatatacagttttctcgkttttttttaataacctttttagatagataggggaagtattgtcctcatgttaaaggtgatgagtgaagcccagaaagggttaatgacttccccatggccacacagctggtgacaacttactggtaagtgccaactgctagcaggactaagattttgcgggacccatcgccatccacttctagtaacattgattgaggtgaattatacttgtgtgtctctgggggtttactttgacctccttctgagcctgtttcatttaatttccttagtgtcaaaatacttcaaggtcaattgctcatcttcccctacacytcctacatgaaaccagagtcaaagaaaacatgtctaggtctagttggcatgggtggaccctggacccattctggctgtccctcgactccagagcttccatcagcaagatgggggtgggcagggagaagtggatttgcagagcagagccccattactgtggaagttttaggcagttcttgatgggggacactcacatgcccaagttctaatgagctttttcccatgaaaaaaatcacttcaagagcacaaacctcaatataaattaactagttttttacaagatggaattgggagcgttgttctactttttaaataattgtggtaaaatagacataacaaaatttgtcatcttaaccatttttaagtgtacagttcaaggatgttaagtacattcatattgttatgaaaccatcaccaccatcttgagaactctttttatctgctaaactgaaactctacctactatttattttatttatttttatttttggagacaaggttttgccctgttgcccyggctggagtgcagtggtgcawtcatagctcactgcatcctcaacctcaaggcccaagcaatcctctcacctcagcctcctgagcaactgggactgcaccaccacacccagctaaactttttgattttttgtagagatggggatctcactctgttacaagggctggacttgaactcctggggtcaggtgatcctctcacctcagcctcccaaagtgctgggattacaggtgtgagccaccgcacctgcctgaaactctaccctctccctcctttccccagctcctgacaaccaccatttttcttcctatctctgtgaatttcactattctaggtacctcttatttcacttaacaaaatgtccacaaggttcattaatgttgtagcatgtgtcagaatttccttccttttctgggtcaaataacattccattgtatgtatatgccacattatttttattcattcacctatcgatagagactggggttgctttcactttctggctattgtgaataatgttgccaygactacatgtgtacaatatctgttcaagttcctgcattagttcttttgggtatatacccacaagtggaattgctagatcatatggtaattctatttttaattttttgaggagccaccatactacacatatacatacatactgccagccatagtggccacaccactttacattcctaccgacaatgcgtgagaatttcaatttcttctcaccaacacttgttattttatgggtttttttgatagtggccatcctaatgggtgtgaggtggtatcttattgtggttttgatttgcagttctctaatgattagtgacattgagcatcttttcatgtgctttaaatgaagttgttttctttttgttgttgtctagttgtaggagttctttatatattttggatagtaactccttatcagatatatgacttacagatattttctttcatttgataggctgtcttttcactcttttggttgtgtcctttgatgcacaaaagcttttcattttggtgtagtccaatttatctatttttacttctgttgcctgtgctttttgtcctgtacaagaagttattacctaatccccatgaagccttccctccgtattttcttctaaaagctttgtagttttagcgcttatatatttaggtattttgatccagtttgtttgtttgtttctttgtttgtttgtgatggagtttcagtctgtcgcccaggctggagtacagtggtgaatcttggctcactgcaacctctacctaccaggttcaagcaattctcgtgcctcagcctcccaagtagctgggactacaggcacatgccaccacgcctggctaatttttttgtacttttagtagagacggagtttcaccatgttgcccaggcttgtgttgaactcctggcctcatgtgacccgcctgccttggcctcccaaagtgctgggattacaggcgtgagctaccatgcccagccttgatccattttcagctaattttttatatatggtgtcagattattttgcatacggatatctagttttcccaatgccatttgttggaagaatattttctcctacagaatgatcttgacatttatgttagtccgttcrcattgctrtgaggaatacctgaggctgggtaatttataaagaaaagaggttattttggctcatggttctgcagcctgtacaggaagcatggcattgacatctgcttctggtgaggcctcaggaagcttccactcacagcggaaggtgagggagaagccagtgcatcacatgttgagagagagatggcagaggcccctgacgcttttctataatcacatcttccatgaacttagagaatgagaactcagtcattaccacgaggatagcaccaagctgttcatgwgcaatctgcccccatgacccaaacacctccaactggccccacttccaacactggcggtcacatttcaacatgggatttggagggaacaaattccaaaccatactagcatcctcatgaaaaatcatttgaccatatatatrtgagagtttatttttggactgtctattctattggtctatatatctgtctttatgcytgtaccacattcttttgattactgtagcttagtaataagttttgaaatcaggaagtgtgagacctccagctttgttgttctttttggtgattgttttggcaattgagggcctcttgagattctatatggttttaaaatgatgtttctattcctggaaaaaaaaattaggattttgatagggattacattaaatctgtagatcactttgggtaatatcgacatcttagcaatattaagccttccatggattgttttagattttgtttattctaatcttctagccaacgtctaggctgtggataagtccctagggatacattctaagtaactgaggaacaggagtatttttcttacaccaccttagaatcaaggcctgtgcagggctggggggttggaggggaaaggaagaggaaggtgtggtacaaacgttgagaagcttcctgtctatgaggattggcagttgtgtaaacatgacactaacatacaattgtagatgtgtaataactgctgcagggtcaacagtgtttcaggcttttcccacttaccttgcccttgaacttaaggttagaagagctctgagagaccctccaggaaagtcaggacaggtcctgcgcatgtttggaagcgatgggaataaaagtcttttttttttttttttttttttttttttgagacggagtctcgctctgtcgcccaggctggagtgccgtggtgcgatcttggctcactgcaagctctgcctcccgggttcacgccattctcctgcctcagcctcccaagtagctgggactacaggcgcccgccaccacacctggctaattttttgtatttttagtagagatggggtttcacygtgttagccaggatggtcttgatctcctgacctcgtgatctgccctctcagcctcccaaagtgctgggattacaggcttgagccacctcgcctggccaagtctttttttttttttaattgctctgagaggtggtagaacattctcttgaaaccctcaaatgatcgaggacaagatgtatagtaaataaataaggtctctctctctctctcggtcaacaacaacaaaattaaattataatccttattcttctttggggaattttaaaattgagtctgaaggcaaaccccagaacttaacgcctatggggttccacatcattttgagcaatgacarccctggaccttcccaaggtggaatcattaaaagcatgtcactcgtgtactctggagtcagaaaatctaggttttcacctgtcatttattatggagataataatacctgttaacacctatttaaaaggttttgtaaacatcagatcatataacatgcataaatgtcttctaagctataaaagtttataaaatattatctagtttagcatcactcatttgttaatcacacctcatacaagcctctaaaattcctgctccatcaccacttcctcctttgcttaaaacccagttagggtgagctcagagctctatgcagcccattggtctgtcctctggcgtaagtatgaattcaaatggtccatgtgatcttccctaaagtaaagcaaaaaacttcctctcccactgtggtccccgttcagaccggttttagaatgtggcagagaagaagcctaactagaactaaggaacaagaaagtcatcaacatggtgactggacagttacactcaatgctaaaattcatgattccatttcaaacaacacacaggtaacacatttcattactgagcatacaaccgttaagtgagattttagacatctacaaagatgatttcttacatactgctaggaggaacttacagagaccaagagtgacattgatttgtccctgggtacagtaactttagaagattctagtatcaattaagcaggtgtgcaagagaacacatccagccctccagaatgagctcctgctttaaacctgaccagatggccgggcayggtggctcacgcctgtaatcccagcactttgggaggccgaggcgggcagatcacctgaggtcaggagtttgagacaagccagactaacatggcgaaaccccgtctctactaaaaatacaaaattagcgggacgtggtggcacatgcctgtaatcccagctacttgggaggctgaggcaggagaatcgcttgaacccaggaggcagaggttgcagtgagccaagatcgcaccactgcattccagcctgggcaacagagtgaaactccatctcaaataataataataataataaaacctgaccagatgaacaaagatgctacaaacacagaatgagctactgttgactccttaatgccctgcagggcccttcatttgtagctcccctccaaattacaagcaagaaattcatttgaaatttgacaaagacaaatgcagacatctgattttccccagagattcaaagtaatcagcttggttgaaagcatagtatttcccctagtgcatcaggcctgcaactatgtttgaggtccattcaagcctggagaggttttaaccagcccacaaaaatctcaccagcctttctgtgtcaccgagattgatgcgtccgatgcattggaccatcagttcctttaaaaattcagttagttaggctgacacttttgcatacctgtagctgagttctccragatacaaggtcctttgaggatttccttggacactgcatatgacatcgctaaaaatcaaatgcaaactaatgtccacagcttaagggtaagtctatgtgtggtttctgttaycttcctatcttctattccccaagctggttttatccctgttgaattacaacctatrccttcagtttacagaatgattactgggggaggggctgtgtatatgtacatgtatgtaatgcatgtatgcatgtagatgtgtgtaatgaggcagaaggaatatgagggaggagtcagggtttctgatcaccatcctcattccccactccagctgagaacccctggttatagtgactctggtgtgaacaggcctgtatttggagcctggctttgtaattcattggctggtaagcaagtcagctaactttgtagatctccttctcctcttctacaaaatgttggttggaaatacatacctcagtgattgttgggaagattggatgggatccttgacaagtgcctttacacacttataagcctacatatggtgttcaataagtctttacagtttttttaataatgtgtattttttctgactatagaaataaaaattatatagtatgaaacaatacacaaaaatataaaacaaagaataactaaccacccagtgataatacctattaatatttaatgtatgttctccccaagctttgttctgcctgtttttgcttagttaaaatcatacagaacataggaatagtaattattttttgagtacttacaatgcgccagaaactgaacttgatgctttacacatttcatttgattaatttttacagtcctacttaayaggtgttaggacccccgttttataggtttttttttttttttttgagatggagtcttgctctgtcccacaggctggagtgcaatggcgtgatctcagctcactgcaacctccrcctcctgggctcaagtgattctcctgcctcagcagcggggattacaggtgcccaccaccacgtccagctaatttttatatttttagtagagatggggtttcaccatgttggtcaggctagtcttgaactcctgacctcgtgatctgcccacctcggcctcccaaagtgcagggactataggcgtgagccattttatagattcttaccatcttgagaagggctctgtgcttagcctgactccctggtgtgaaattgaaatgctttcctgtattaagccaatctcatactcaacatcagccaaattaaccacatattaacagaagtcatattaacaaaagtcatattaatggaagtcatattaacagaagtcatattaatggaagtcatattaacagaartcatattaatggaagtcatattaacagaartcatattaatrgaagtagaatgcatgggtttgctcttggcttttccctcccaaaagactcttagctgaaattctgcctttagccagaatatgtacataactctcgtggaggtgggaatgatggcttcacagtgatccctctgccttactactctcaactatctcatgacacttcattgacagaaccagtgtttctgtttataagtgtattctaatcttcagaatgagctcttaacacacacacacgtgcacatatgcacacatacacaaagtytgagtctggccaagggaatgtccagttggtgtgttctagttgtttagaattgtggggagccctggaggccacataggatttttcacttgagatgtttctgctctcttctgattcccggttcactgcagaacttagagctgcgtaatggtgtgtggggggagaagttatatatcaattgagtagtattactatcattagggttgtgtattcaggaatgctggaatgacccagatattcctcctctagtgaggttcccccaaggggacatacctcaaggtgagagcaaatgagaaayaggcatgccactttcttttcagccagggccctttcctgccagcacagggagactctggtaaacatgctgtagcatgcgacttaggctaaaagcctgagtgaggccgctgactctttctagacctaaatctgaccagtgggatactttacaggtcaaaaggatgactatgttgcaaagcccaccttaaataacattagctcccatttatgtagtgtttgaagtgagtcaggcgctttacatgtacaaactcatttaaccctcacaatagtcctgtgagtcaaatactattattatcctcatttttaaatgaggaaactgaggcatacaccaagaataagatagttgttattctcaacaaagagttcctggatggcatggagagctcctgcccactggtaaacgtggcctaacccccattctgacttaatcagaagaaaactaaggtgggggtggagtcagagggcaggagggcaaacttctcctcccgctccacttgctggaatgaccaaagcaaaaccatgatcacagtccacaatgctcatgtccttgtgctggtgggctgccctcatgccctgaggggtgcaaggatgagtgtggtcctgtgtccggaaatggtgggttcttggtctcactgacttaaagaatgaagccgtggaccctcgcggtgagtgttaccrttcttaaaggcagcgtgtccggagtttgttccttctgatgttcggatgtgttcggagtttattccttctggtgggttcgtggtctcgctggctcaggagtgaagctgcagaccttcgcagtgttacagctcataaaggcagtgtggacccaaagagtgagcagtagcaagatttaccgcaaagagcaaaagaacaaagctwccacagtgtggacggggaccccagcgggttgccactgcaggctaggatctggccccacccacatcctgctgattggtccattttacagagagctgattggtccgttttgacagggtgctgattggtgcgtttacaatccctgagctagacacaagttttccaagtccccaccagggtagctagatacagagtgtggacacaaaggttctccaagtccccaccagagtagctagatacagagtgttgattggtgcattcacaaaccctgagctatccacagggtgctgattggtgtgtttacaaaccttgagctagatacagagtgccgattggtgtatttacaatcccttagctagacataaaggttctccaagtccccaccagactcaggagcccagctggcttcacccagtggatcctgcactgggccacaggtggagctgcctgccagtcccgcgccctgcgcccgcactcctcagggtggatgggactgggcgccgtggagcagggggctgcgctcgtcggggaggctggtgccgcgcaggagaccagggggaggtgggggggaaggctcaggcatggcgggggctgcaggtcccgagccctgcccsgcggggaggcagctaaggcccggcgagaaatcgagcacagcagctgctggcccaggtgctaagcccctcactgcctgcggccatccggccggccggccggccgctccgagtgcggggctcgcggaatccacgcccacctggagctctgcgcacgcgcctgcaagcgctgcgcacagtyccggttcccgcctgcgcctctccctccacacctccctgcaagctaaggaagccggctccggccttgggcagcccagaaaggggctcccacagtgcagcggcgggctgaagggctcctcaagcgcggccagagtgggcgccaaggcggaggaggcgctgacatcgagcgggggctgtgagggctgccagcatgctgtcacctctcagtcccactagatcccaagaggcagcagaggcagcttctgaaaaataaaataagtgagtaggcaccccaccccactcgctccctttcccacggccccacccccctctcctggttccatttggcccactcagcttcttgcccaaacttcattctgaaggcgttggctctctccatcagggtgaggtcaccaagctttggggttacatgtatctgcttcaggcctgtcactcactagtccctagtgaccttgggaaggttaacctctgagggcctccatttcctcatccttaaagtgggaataatcatacytcccggcaagagcgccagagggcttatgggatggctgtttgtaaagcccttagcacagtgaagcatagccagctgctgaaatgttgctgatggcatctcagcagcccttccaagggcacttgtgctctaactaaggtcccctgaaaaccaaaggccatggagaatccggtgaggctggtgccagagccccagggtgccagcagggtgatgttgggggcaggccaatgtccccaagtctctgattcattcagccaagggcagagttctctgctcgtctgcttacttgatgttgaagactaaccacagtccggtgaaaacaagagcagagctaggaaccagacagctactccaagggactttctaatgatacatagcgaagcattttgaaaaaaattagatggtatctcattgaaacatttcaaaaaattttaggtattaaaaacaaatggttcaggtcacttccaaatagaataactgatcgacagctttttatataggaagagagtgctgattccaggagagagaggttaggtcaaaccccctagttttggcacaggaaaatggcttgtcagagtagcttctcaaactatgatgctgtgaagactcacttagggatctggttaagatgcagactctaggctgggtgcggtggctcacacctgtaatcccagtactttgagaggctgaggtgggtggatcacttgaggtcaggagttcatgaccagcctggccaccatggtgaaaccccgtctctactaaaaatacaaaaattagccgggtgtggtggtgcacacctgtaatcccagctacttgggaggctaagacaggaggattgcttgaacctgggaggcagaggttgcagtgatcacatcactgcactccagcctaggctgcagagcaagactctgtcaccaaaaaaaaaaaaaaaaaaaaaaaaaacagattctgcttcagcaggtcgcrtgttgtgcctgagagtctatatttctaacaagcttccaaatgacatgctgctggtccgtgggccacactttgggaatcagtgtggaagaaaaagctacctctctgccccgtgcttattttggtctaaaaggtcatttgctgccggctcctgctcagtgacatataatctctgtttgtacctgtgtccctgaattatctttcctgtccccacaaatggcctgaaaatraccccacaattggaaaaatcgcctggctgtctcatgcaaccctaacccaaagttgtttcagggagaacattaagccgcctcccaagctcgccctctgctggtgaacaagggtcatttttttcctaaaccctcacccagcctttcttgctgcacaaatgctctttttttttttccttccaattaatacagacagaaaagtcgcatgacctattccagaggtttattgcactgttgtcgattttggagaatgtttccactctgttccttaaagtacacccctcagaggaggtagataaatgtttgaccaacactgtctggcaactcacgatattacgagttctccgtgttgcctaaacatcctcttcttgactgaactttgttctcatcccaccccacacactttctacagtggtggcaagccttcatttactcacagctcgaatgtggcaaggtcagggggagtaatggtttcctytgatccagggttggaggaggatgcaaagtaagcatgtcccagagacaaaagaacatttaagagaaggatatggagatggggagactcataacacagatcataccaccatcaytcattcattaaaacatttcttcatcacctactgtgtgcaagacttgggactaggagcagagaattcttaatccctgcacacggggaacctaagcctcatagaggaaataagcgtaacagtgaatcgttagtgagtgtctgctgtatgccaaggagcatacgtatgttaccttatttaattttatttcatcctcacagcaatcctatgatcatcctcattgtatgaatgagaagactcagatgcagagaagttgagtcagacttctagttaatgaggaagtcagtttaaatgaacaatatgtaagtctggcacagtggcatgtgtgtgtagccccagctactccggaagctgaggcaagaggatcacttgagttcaggagttcaagactgtatagtgcactataattatgccatgaatagccattgcactccagcctgggcatcagagcgagaccccatctcttacaaaagaaaagaaaataaaaactttaaagaacaatttgttattatctctcgtggttctggaagttatggggctcagcgggctggttctcacttggggttccttatgcaattgcactcagacagtggctggggctgagatccatgtctggagccagggctgggatatctaaaacagttgggggctggtagggcatctccgtccacatggcctctccacatggctaacttgggcttcctctcagcctggcagtctcaggatagttggacatcttagatggcagcggactccccactgcagcaagtgttccacaaaaccagacagaaactgcaaactttcttgtgacctagactctaaaagcatggacattatttccgctacagtctgttggtcaaaatagttacaggtcagattcaaggtgtttctgtgtctcagtgggagagtagcttacaagtaaagtgagataacgaattgatgaagcccatcctggagacaagtcatgacaccagggtttgaccctaagcagcctgattccagcctctgtgtgctaaagcattatgccccactcacctgacacagtacaggcacagccacagaatgccacctgtggctgttatatcacggtggcttgaaggagaagtgattagctgtgcctcaggtggtcaggaaaggcttcacattagaggaaacaccccctcacacatacatactcctttcttctcagtgcagaagaagacagacagtggctgcagtgggtggcatatackcgtctgcatcacgtgaggtggcctaaaagctgagggcaagagacagctctgaggcagtgtgtagaagggaactgacctggaaggggggagctatggagtccagtcccagctgcaccatagtgtaatgctgggaccttgaagggaaccagaaggccaagaaaggaaaaaccagaggccctgggcctttccagaacatcagcagggtgaggtttctgactgtgttgtgctccactcccatctccagattggagacccacagttggtgatctgtatggactgctcggcagacaccatgaccaaccgccttctccaaaggagccggagcagcctgcctgtggacgacaccaccaagaccatcgccaagcgcctagaagcctactaccgagcgtccatccccgtgatcgcctactacgagacaaaaacacagctacacaaggcgagtcacttcactttctcctctgaaatgagccgcttaccttttttttttttttccaagaaaagagaaaaagctgagaacattttagttaagggatctgggaattagaactctgtgcagctgcagcactggggccaaaaggcccagcacagtggctcatgcctgtaatcccaacactgtgggaagtcaaggcgggtgtattgcttgagcccaggagttcaagrccagcctaagcaacatagtgagacccctgcctctgcaaaaaattagctgggtatggtggcacatgcctataatcccagctactcaagaggctgacgtgggaggattgcttgagccccagaggtggaggctgtagtgagctgagattgtgccactacactccagcctgggcaacagagcaagaccctgtctcaaagaaaacaacaacaagaatttggaccaaattatgaatcccttactcttcacttctatttcaatcaaaattaaatatctgtcgtcatatagaccataaaaaggtggtcatataattttcacagatccccttatagttgctgaaaacaactcctttttcccaaaaaagagagagagggagagaggaagggaagaaggcagggagggagggaggcatagatgagacgtaggctctgccactgactctggactgtgagattattcactagagctaagattcaatgactttgaatttctataattttacatcgttcacaattggctcttggctcctttgcctcaatttcttgtgataaccaacatttttagaagaagctgcatatggggccaggagagcaggtaattaagtaaaacaatgaagatagtgtgaggaaatgagtgtatcaacctagtgatcatgagctctctgctgagtcaccatcagttttatgaatttgggaaaactgcccagtcctcatccttccactcatcccataactatgtatcaggaacccatagtccatcaattgcactagtggtttggatgcaaataaataagattcttgaatccttgcaaagcttagggtttcagtaggagagagagacaaacgtgtgatcacacaatgagatcaaagcaagcacagaatgtgtggcaagggccctttcctccagtgtaaggggaaaggaaaggatccaggaaggtggcctgaggaggactcggctgagtctctgaagcgggggtgcacgccacaccagagaagccccaagtggagaaggtcaggaaaaccaagtaactccacgaggctgtgacataaagtgccaaggaaaagagggttaagagatggagatggagaggcaagcaaggactagatcaagatggatcatatgtaggagcaaataattgtcctstgagtgatgggaactaccaaaggggcaggaataatcaggatttcaatctagaaagctcaatccatcatccttatggggaatggatgcaagaaggtaaggctaggagaccactgagaggctagaacagtatccaggaacaaatccataaggatgacagagtgagcttttgtccaggaacaaaatcctgagtactcgaactggagaagggagagtgggatctcttgctgttcacaggataagagacatcatcaataaataacaaacttgtctctgaggaagctacattactgattccttgggggaaaaccattgataatgaattcttatcttctaactctgttaatggtccgctttccagaatcctaagaaacactgggtatagaagtctgaaagatgcctctgcatttaactgagtgtcaaatatgtggcatgagagacataatcccctacttccacatccatggccattgctagttgatcccagcactgtttctcagtgagcaggtgtggcctgagaatgtttgtcaacacagcactccaggcagctactgccaattaataggacttgatgtgcaacctgagacttatttgttgtgctttatataacctctggctgccacattttaaaaataaagacttcgatctttaataacagggccaagtgcaatggctcacacctgttatcccagttctttgggaggccaagacaggaggattacttgagtccaggagtttgaagaccagcctaggcaacatttcgagaccctgtctctccaaaaaatgcaaaaattaactggacttggtggtatatgcctgcagtcccagctacttgggagactgaaatgggaggatcacttgagcctgggaggtcaaggctgcagtttgccatgatcgcaccactgcactccagcctgggcaacagagcaagactgtctctcaaaaaaaaaaaacaacaacaacaacaaaaaaaaacataaacaaaagtgtttttgttatataagagcaatgtcttaagaattcagggctgcaaaggcctttccaaaattagattgtctagtgatttccaccttttgagcagcctggaacattaaaaaaaaaaaaaatcctggtgtggtggcgcgtgcctgtaatcccagctactcaggatgctaaggcagaagaattgcttgaacccaggagacagaggttgcagtgagctgaaatcacaccactgcactccagcctgggtgacagagagtccctgtctcaaaaaataaaaaaaaaaattaaaaaaaagaaaggtatttcttccacttttaagatttgtaaaggtgggaaaattcctaagtaattcaggatttaaccacttttagagttggaaaatccctcttagctctctgttgtattattccaacctgaattctacaaactcacaaatgactgctcgtgagtacagggttgagttctcagacaaatctgatttctggaatcttccttagagctttctaagttagtggtgtccaaaagaccagattacaacacatttaaagatcttcattggcttttattcatgattctagaattgggcagacctcaggaccagaaaaatgtttgaagaataagccacatggtcaagcaatatttatgtttagaaaacagaagtgaggaactgaggttaattagttacagccttatgtgaatcagctggctacctactattgacttaagctcagctgctggaactaccaaaactcagccatctgttacagtgtgtacatccaagttgtttgtttcatttagcacggatgactccacgttggttcggcctgttgggcccagaacgggagcctagtccaaaccaatggcctcctacaaattttatttaatggtggaaaagaggtttgcagtcccctggctcatctcttcaacttcccctgcattttggagatgctggctgctgggtgcgtggtgaggtaacattatgatccactgcacaaatatgtaaaacctctccagcccggactgcagagcagcgtgagcttcagccttcaggactcccagagagtctcagggaggctgcttcatcccactgcccctgcccagggccatcccctrcccacacagctgcaaagatgaacagtcctccctacacacctagcatagaaacagtgtgtgctgggcccaggaagctgagatttgtctgcaggtacccgtggggtttgccagtagctagggtgacaagagcggggactgcaggagaagcaggggaggggacaggattgtttgccgctggagagggagaaagccactggcccactctgttgtctggcctctgggtttttgcccagtcctcctgcatcagcttaatctcccttggttcctaagtaacagcttgtggcctgctcctgtgatgctgtttggattgtttgcccctcctccctgttgttttactggacccaagacagggctgctcacccaagaggacctctgggtcacttaaggagctttcttaaaactaggtggggctggtgaatgcacttcaagaaagcaagtgagatgaatcagcagttctgtgagatttatttaggaattaaagccacagggggggccaacccatgcagcccacaaataggccacaagcaccgccctcaggcctctacccagcaatgctgacattgaacccatcatctgacaccctccatcccccactccatgacaagtcagccctttggccaccagctagctaaggaaagtgcagcaaaatttcaaacaaagataatttttaaagcaaagcagaatttatacagccactcccttattctttatgtcatcataatgccatccttgtacaataaagttagaacttcttgtaacgtgcacaccagagatggaagtacatgtgatacaggtgtatccctttctgcctgtttttctccctctcataaagcagaggtttgccctgcatctgagaaagaattagaacagaactttcctccatttcattccccacctcactacacttgggccaggcagcgttcgccagtcatggcacttcctaccaagtctgaatgctgtctcagaaacttgctcaacacagccgtatggaccatcacccccaactgactagaattagcctacaagaagaagttttctttcaccttagtgagataatttattatggccataagtaactgaaatgtagcatttggggatgaaaagcacagttaccagccaaagactccctgggggatggcggggggaatatgggcctgtgcgtcagaaagccccaggcacactttcatcaacttcggtgagtcattttactgcttcacctctcagttcttcttcctaaagtggatagaacacgatctactagaattgaccaagtctattattataaaagtaacacatacttgctttataaaatatagaaaactggtcaggtgtggtggcacatgtctataatcacagcagtttgggaagccaaggagagtgtgggtcactggagcttaggagtttttttttgtttgtttcttttttttttagagatggagtctcgctctgtcacccaggctggaatgcaatggcgcaatcttggctcactgcaacctccacctcctgggttcaagccattcttctgcctcagcctcatgagtagctgggattacaggcacccaccaccacacccagctaatgttttgtatttttattagagatggggtttctcttatgttggccaggctggtctcgaactcctgaccttgtgatctgcctgccttggcctcccaaggtgctgggattacaggcgtgagctaccacgcccagccaggagcctaggagttcttgactatcttgggcaacatggcaaaacccatctctacaaaaaatacaaaagttagccaggcgtggtggaacacatctgtggtcacagccactcaggggactaaggtgggaggattatttgagcccaggaggttgaggctgcagtgaaccaagatagtgccactgcactcaactggcgagatcctgtttccaaaaaaagaaaaaagaaacaaagaaaatgtagaaaactaggtagtcccaccactcagaggcaaacattgtggggcgttttcaccacatctttttgctgtgaattttaaaaacatgattgtgattgtaggtaatactgagccagactctgtggttgtaggtagcaggtgccaactcccgctggcctaacctgaaacacagaacttcattataaggttagaagactcaaggctgaggcacagcaggccctagaaggcgtgtgggatcaggcctaaaaggctcacagtgctccctactgcttcacaaacaccgtttccttctctctaagctgggttttttttctttctctggcttataagccagaatatgcccacctgacagctttcgcatttgcacattaccacggcactctgattcccagctccagattcctgagagaaatgatgtggttggccttgctttgctcagggtctccttggctctcttagctgtggacaggcagctggggtcacagggggcttttttatttttttctgtactttattgagtgcatatggtatgtgtgggacacgacacttggtgctggggacacagcagtcaacgtgacaaagcccctcactgaaaagagaaaaacaggccaggcacggtggctcacacctgtaatcccagccctttgggaggccaaagcaggcagatcacaaggtcggcagttcgagaccagcctggccaacatggcaaatgtctctactaaaaatataaaaattcgctagacgtggtggtgcgcatatgtaatcccagctactgaggaggctgaggcacgagaattacttgaaccygggaggcggaggttgcggtaagccaagatcacaccactgcactctggcctggatgacaaaacgagactcggtctcaaaaaaaaagagcaaaaccgtatacaagaaaataaagcaaccactaacaagttctgtggataaaacaaaacagaatgcattgttgggagtgagcactgtgggcagctgtttggaaagtctgaggaggtagcatttgaattaggacctgactgatataaacatggttacctgggactcttccctgtgaagcagatggaggacaaggaatacccagagagaagggctcgttgtgagctgagagaaaccacagaaatagctatctcaagtggcataggcagaattgtatcaaatgatatttaaagcctctttttttcctaagtataagtaacaactacacattgtttaaaaaagaaacaaactagaaaatttaagactataaaggtaaacattaaaattattgagaattattccacccaaagataatcaccaatgaacattatgatatatttccgtacattttggtttttttccatttttatatacattttgttcatggcataattagcccagaaacaccccaggccatagatgaagagggcctggtaacagattatttctgtccctgcgttatttgctactcttaactgattaaaaaaataaaaagagagcccagtgactcattaaacatgagttttgcagacagamaatcaagttccttggcaactctgcttttgtagaggagataataagcttttttcctcagcaattctgctgctgcagtgtctcaactttgtaaatagtttgaccgtttccattaggtcctgaaatgcaatggtccacattgttctggtcaccatgctgtcaggagaagccctatgaattgaggcaagaagagtgagaagtttctgcagtttctrgtattactgaggaaagtggaagcagaaggtaccataaggtcacatttcaccgcttggttgcaaaatctactgggtaattcataactgactggatccccaagtttggagtctaacacaagtaaaggaaaacccaaaattacttgtataccttgaattctctgtactaaattcttaattttgattcttctttcagttggctaaagtaactcaactaattttgagttcaatttctcattgaatatctgagaatgccattatagtggcttcacacacaaatgacagtttggacataatttaagtcataataattatttttctaccaaaagtcagtaaacattgctctattttttttttctattgtttgttttgagacagggtctctctgtgttgcctagtcgggtttgcagtggtgcaattacggctcattgcagcctcaacttccctgggcccaagtaatactcccacttcagcctctcaagtagctgggaccatagacatgaaccactggcgatagggagcagtccaagttttcagaattcttgtgactattctcatttatgggggtcttcaggagtattttcgtaggaagctgggaagctgtattgggatgctggccagattccatgcgaggtaagagcagggacaatggagggaatattttccatctccggttagttgaatctgcaggtgcagaactttggatacagagagtagactgtatatatttatgtgtgtatgtgagagtacacacacacacacacacacacagtcatgcatcatttaacagtaaggatacgatctgagaaatgcatcattaagcaattttgtcattgtgcaaacatcagagagtgtactaacacaaacctagatggtatagcctactacacacgacagcctgtcactgtattgaatactgtgggaattgtaagacaatggtaaccatttgtgtatctaaacatatcaaaatatggcaaagatacagtaagaatacagaataraaaatttcagtggtaaacttgctgtatagagtgtttaccatgaatccagctttcaggactggaaggtgctctggatgagtcactgagtgaatgtgaaggcctaggatgttactgtatactactgtaggctttataaatgctgtacagttaggctatgctacatttgtaaaatatttttctttcttcaataataactttggcttactataacctttttactttataagcttttaaaattttttcacttttgaccgtttcatagaacttagtttaaaacacaaacacattgtacagacgtacataaatattttttctttatatccttattctatgtttttttctattttaaaaaaagtctttttttttttactttttaagctttttttcttaaaaactgagatggagacacacacattcgcctaggcctgcctacacagggttagaatcatcatgccactgtctttacctccgtatcttgcccactggaaggtcttcaggggcagtaacatgcatggagctgtcgtctgctttgataacaaggcctttttctggaacattcctgaaggacctgcctgaggctgtttgacagttagctcttttttaacaagtagaaaaaatgcactctgaaataataattgaaagtataatataggaaatacataaaccagaaacatagtcatttattgtcattatcaagcattgcgtactttacgtgattgtacgtgctatacttttccaacaccggcagcacagtggatttctttacaccagcatcaccacaaacatgtgagtaatccattgcgctgtgacattgtgatggctaccacatcacaaggcgctggaaaattttcagcttcattataatcttatgagactgccattgtataagcagtctgtcattgaccaaaacattgttatcagtgcatgactatatatacccacacgcccgcaattaacaatgcccttcacaaccttgcctccctcaagtaaccaatgtgaacagcttattgtgtatccttccacctctcctcacttcctccttttcctcctccttctgttctctttctctctttcttttcttctttcctccagcccctcattctttctctctgaaatcaaactttttactacagacacacacacacaaccatggtgggggagggctgatttcatgcaaatactcccaagctgtacgcatttctgtgaaacacctccaggttaacacatcacaatattgttttctttttaatagctatataatatgccacaatatagatattctacagtttattcaactaggttgtttctagttcagtttggttgtttttacctactactaacaacgatgcagtggaaagacatgcttaattagatttttttctagtaggagcgactgctgagctattttaagcaaaggctgattttttttaactcattcatttctactcccctggctctccatgttgccctgggaagagttctttgaagtataacaagtaaaacaaggagctttggaatttcccagctccttgatgcttagcctcttttagcagtgccccaccttcactgggggtgcctatcagtttcaagtctgaagcgtccctgcatttcatctgggcctgccttggttgacaactagaaacctagatttagatacagccctccctcctgctggtgcagtgaagagaaaggtgtgcctgaaggagagagtgacttagaggaaccctaaggttctatcctctcacttgacaaatgaagcataagtcttccatctggctctgagagacttaagagactttttctttatgactctgcttaaaatagtcttctctccaccccctttccttcctgattgtcagaccttcaccagattcccgcaaagacgttttgattcgatgcaatactgtttgcacccctgcggtcctgctgaaatgagttgtgcttgctgcgtgtgtgtctcctccccaaacagcaagcagaagagaattccaggcccttttgactcatctgtacacactcttgatttcttcctctgtggttgctataatcacatagcagattttgcctttgcccatgttagggcacccccttcactgaggtccactttaactcagaacccctcccagagtcactgacatgaattctaccagcaaagaattggcaccattctatgtaaggtctttgacatgctcagcagacatttactgggcatctctaaggtccaaggcatgccacttaatgttgggaattcgtaggaaaaagacatgtgcttgtaatcccagcactttgggaggccgaggagggcagatctcttgaggtcaggagtttgagaccagtgtggccaacatggtgaaactccatctctactaacattacaaaaattagatgggtgtggtggtgtgcgtctgtaatcccagctactcgggaggctgaggcacaagaattgtttgaacccatgaggcagaggctgcagtgagctgagatcgcgccactgcactccagcctgagcgacagtgtgagactctgtctctacacaaaacaaaacaaaaaagacttgtgaaactctgtgacacatgaaaccccagcgaagtagtaggtgccataataggatctacagaatgctccaggcctttggggcacagagctcgggcctgggaaggcaagtaaatgcttcagagaaaagaggacatttgagctgggtcctaaaggatgaagagaaactcaagccagatgaaggagaaggaacaaagccactgacacgtgaaagcgccaggaatgctggcccagatgaagtgccaaatagatgaattaaagtcgtggcagatgagactaaagagcaagattgaagcaagtggtgaagggctttgaatccattcatttattcattcttcctgcattcagtaaatttgctagatcagcactgtcaaaagaaatagaatgtgggccacatgtataatttaaacttttatagtagtcacataaacaaaagtaaaaagaaacaggtgaaattaatttaacaatatattttatttaactatttaacctaatatatcctaagtatcatttcaacatgtaatcaatataaagttctctttttttttttttttttttttgagacagagtctcactctgtcaccaggctggagtgcagtggcacgatctcagctcactgcaacctccgcctcctgggttcaagtgattctcctgcctcagcctcccaggtagctggaagtacaggtgtgtgccaccatgtgtggctaatttttgtatttttagtagagacggggtttcgccatgttggccatgatggtctcaatctcttaacctcttgatctgcccgcctcggcctctcaaagtgctgggattacagacatgagccactgtacccagccataaaattcttaatgaaatatttttacattttttttatgaactacgtattcaaaatctggtacttagggctttacctcaaatttagttgctaagtttccataaaaaatactggaactatatttatatttcataaaatttacagttgaaaagtagatttcacatacccaagtcattccaaatatagttcttaattttccaaaaattggatcaaatgccaggtttaaattttagattaattttaattaaacagtattaaaaatcagttcctttcttgtgctagtcagatttcaagtgcccagaaaccacgtgtggctaggggctaccatattgcatagttctagactacccaaggatgtttggactgaatactgaaagtactcagttctaggagggaagcactgagtaactttaaacaggaaaatgattgagcaggtgttttagagaggtcatttttagaaaggatgattttttttcatatctgctaaaagatgttattcaaaactttaggcagaatggagaggaagagaaaaggaaaaacagttacttaaaacgtttaagtggacagactgcacgtactatgggaagtcctatttatagacaggccattaatgtgctgattataagtcatccttatatttttgctgaagtttgtccttaaatctctctacagtcaatgtatatatagtcctccttctttctatggctttgataacgaggagaactgtgtggcctgactggatatgtgaactggatgacccccatgagcagtcttttacataaccccracttttgaaaactgcatttgatgattttccccagatcatgcccaggttctgcacactgaggtctaccttgctgagccgctgctgttatcctctggcagtgarggatccctgtggtgtgaggctgtgtcttgtttaacaggggacaagattagaaaaggaaggtgctggcacacagaccgtgatcctaaaccatgctgtaacagcttggctttgtcccagaggttccatggtgccaatacatgaaaaataaaatgaaactcaagcaatggtttcaactgtctgggaaaattcaggaaaaacacaactagacataggcaatgtttggaccagccaactgttttatgatttacaaatccatggaactaaagaggaagagtaaacaaaatgtgtaattcccaaagcagtgtaattgctttcctcatttagtcatatgttctgttgactgttgggtagaaatattatcactgactgctctacttttccttcaagaagtcaggtaaaagctcagaaatttactatttcctgttcacttgcttttagctttttttttttttttttttttgagactgagtttcattctgtcactctgctcactgcaacctccgcctctcggggtcaagcgattctcctgccttagcctcccgagtagcaggaattacaggtacctgcyaccacacccgtctactttttgtatttttagtagagactgggtttcaccatgttggccaggctggtcttgaactcctgacctcaggtgatccgccctcctcggcctcccaaagtcctgggattacaggcatgagccaccgtgcctggcctgcttttagctttttaataaaataatattttgctacactggtcagaacatcacttactgtgggatttttatatcatgtctcagaccaaaaatggtaaattcttttttttatgtttatttcttccttaaaacttttaacttttgtgggtacatattgggtgtatatatttatggggtacgtaagctactttgatacaggcatgcagtatgttaggatcacgtcagggtaaatgaggtatctatcacctcaagcgtttgtcctttctttgtgttatagataatccgattatagtcttttagttatttttaagtgtacaataagttattgttgactagagttaccctcttgtgctatcaaatactagatcacattcattctatctacctaaatttttgtatccattagccattcccacttccccctctcccttcccagacactggtaactatcaatctactatctgtctccatgagttcaattgctttaatatttagctctcagaaataagtgagaacattcgaagtctgtctttctgtgcctggcttatttcacttaacatgacttccagttccatacatgttgttgcaaatgacaggatctcattctttcttatagctgaatagtactccatcatgtatgtgtaccacattttcttttttctttttttgagacaggatctcactctttcacccaggctggagtatagtggcacaatcatggctcactgcagcctcaacctcctaggctcaagtgaccctcccacctcagcctcttttatttatttattttttttttttaagggacaaggtcttaccctgttgcccaggctggagtgagtgcagtagctccatcacagctcattttagccttgaactcctggcctcaagccatcgttcacctcagcctctccagtagctaggactactggcatgtgcctagctaatttttttatttttgtagagacactgtatttcccaagctggtctcgagctcctgggctgaagcaatcctcctacctcagcctcctaaagcatgggcagtttacaggcgtgagccattccatccagctggtaaattcttgaagtcagaagcaaatctacttacctagtttctaactaaattaaatacattaagacctcatacattctgattttgctgactcagaattgcagatctttcggagaaaggtcacgrtgaaacttacttttgactgttcatgataaaagagggttactataaattaatattataataattgattatagaggaaacacaccctatattgcaggacgtattacttttaagtttacacaattactgaggaagtctcattcacagaaaacagtcagtaagctgattgtgcaggattgttctctgtttgctaaggacattaaacaccagcacccttataagctaactggtttaaatttgctaaagctctaagcacgaagaaaagttcctgtaactttgaaagcatttagtaaattggttcttttccatttcttttgagttgcagttatatacaaaaagataaatgccacttattctcttaaaatactctccacatgggaattagatgagcaaagagaatctactttgagacttaggaagagtcgagctaacctgtagaatgaaaggagaaatttggagagtagayaaaaggttttgttcccacccaattcaactgggctctcttttgctccttaaaaatacacttcaggccaggggcagtggctcccacctgtaattccagcactttgggaggccaaggcaggcagatcacctgaggtcaggagtttgagaccagcctggccaacatggtgaaaccccgtctctactaaaaatacaaaaattagctggacgtggtggcacatgcctgtaattccagctactcgggaggctgaggcagaagaattgcttgaacccgggaggtgggggttgcagtgaacttagatcataccattgcactccagcctgggagacaagagcgaaactccatctcaaaacaaaacaaaacaaaaatgcattcagaaatccaggcctttcccaacacacacacacacacacacacaccttctataagacaacagaaattgcctcactgactttattctcagaacttggcatcttggtcctaaggaggatcccagataacttcacagagttttctagtcacccaagtaaaagactgcttttcccatctagaaagccttatcatttgattttgtctttaaacctacccatatctttgggctccacaggggcaagcactacagtacatgactctgactggttggcaataagcaggtttttaatttcattaataaacccccatatttaagccacacaacaaaatgaggagggggattggggttggaaatagaggtgggcaatggtccactgagagctctgggacccttcccagctctccccaaaacattagctctggcctgattgacagaaagtaactagcactgcccttgaggtgctgcgtgctgagtcctctgtgctgaaaccaagtcgccttgtttttagaaggcagaatcccttctccttccataaagcctagactacagaaaatgggctctaagaacatgtttcctcccctacaacagttcatttctatgaggaaagaaagagcaaatgtgggaatagaggatacattcttttgtttaccttttttgttttttgcctttctacctagagccaggcacggggggatactacactgagtaatgacctcgtgctcatggagcttattgtctagctggatgttgacaaaggttctctgctgaccaaactttagtcaaactcttaaaccttctcctaggcccatctgtgcacttcctcgtaaaacccagttttagcaaagaactctgctaaatcactttagcaagatcccctactctgaatatctgattggggtgctcatcctccatcatccccaggtgctgtctgatcatattggtctgtcttcagcaagagtcctgttaggtcggtgtagccagaactttccttactcctgatgttattacctcttagtaattttccatccactgactcccagcctgctctttgactataaattcccacttgcccacgctgtattcagagttgaatcccatccctctcccccactgcaaaattctgttgccgtagtccctatacccatcgtaatggtccccaataaagcctcccttaccgtgctttaacaagaatcattgaacattttttttctttaacaatatacaaatacttgggttaagactgggttttatctggccaagaagtgaaaagttaaatgttgcagtgaattgcaacaactaaatggccactgtgatagtcagtggggaaggtaatacagaaagagcctttagttcactgtgatagtaaaaggcagaaggtaatagagtgcattcaaaggttgttgtaatgagcaaatgtgtttttatcagagtctaaaagaaatcctggacaaggatcaacccaatttatgtgagtgtaacactggcattatgttgaatgaccaagttatccattatgaaacacagaggaaatagaacataatgcatgtgttcttggccaggcacagtggcttacacctaaaatttcagcactttgggaggctgaggtgggaggattgcttgaggtcaggacttcaagcccagcctgggcaacatagcaagaccccatctctacaaaaacatacaaaaaattagctgggcatgggggcacacgcctgtagtctcagctaatcaggaggctgaggcaggaggactgcttgagcccaggagttagaggttacagtgagctatgatctcactactgcactccagcctgggtgagagagcaaaaccttacctcttaaagaaaaagggggttctttaaaaaatttgtatattaatagtgttaaaagacacattacgagtatgagaaacataggtatggttttcttttggaaagaaggtaaatttggaaaatcatatataaagttgggaatgttaagtagtattggttgcagaagacagattggaggagagaaatgtttcagggccaaggagcagaaatagaccatgctaagtcagttaaatgcaagggactggtggaattcagcaagaggctggagaacagataaataatgaggaagatgctgcaaaatatctaccacttggtgaggacaagaacgggccctagaacacagttgggtttgtacagatgaagcagagggcgtaactgaggctgaaaagtcccactacacatgtgcctcaattaggtagtgatattgtagtgagaaaattcacatgcatttgaagtagatggtcacttgggatcattccgtaggctaattatattcctcttctggggaagatatggagctgatttggggcagtgtttgtgccaaagacaaaaaattggatcactagggtgaagaacttacattatgcacagaagagttgtatttgagtctgtcctcatggaacttcttggggaccagtgacagacctgatgcattttccactgatacgatcatggacagtgtaaataataaatcaagcgtttgtggatttacaccttcttacccgtccctgctacaggggaggaaacttgagaaggggcgggaatgtgagttagcaaccccttcctttcctccctcctcccagcgtttgataaggcgagctcaggtgactgtayagtgggctgtgggcagaaacagatttgctgaaaagagatgaggaaggcagacatcccaaggcatgtttggaacattcgggttaaatgcagcatagcattattcagcaataaaaaggaatrmagtattgatatccactacaacataaacgaaccttgaaaacattatgccaagaaaccagtcacaaaagaccatatattgtgtgatttcattgatataaaatgtcctgagtaggcaaatctatggcgacacctcattccaacctatttttccagcttcctctttttatctgcctgcccccatcaccccatgcagcatttgctctgtcctcaacaaatgacccactgttcactgaaaaatctatgtgctttcagatctctacacctttgccacctttattatcttccagtacatgtctattcttctaggccgagcttaactggcaacaccaaactaaactgaacaatcctgacacctgctgagaggagctcatccccactaaaaagtgagctcagatttggaatagcatagaacatccaggctggaaccagacctggaggttatctagtcctagttcagtcccttcatatgatagaggaggaaactgaggccccaagaggatgaatggcctgtcaagtcctgaagcacactgagggcaatcccaggcacgcctcatacagggctctttgccttgcacttcaacctttctgcagtttttttgttttatttgggttttgtttttgtttttgtttttgtttgagacggagtctcactctgttgcccaggctggagtgcagtggcgcgatctcagctcactgtcagctccacctcccgggttcacgccattctcctgcctgagcctcccgagtagctgggactacaggcgcccgccaccatgcccggctattttttttttttttttttgtatttttagtagagacggggtttcgccatgttagccgggatggtctctatctcctgacctcgtgatccacccgccttggcctcccaaagtgctgggattacaggcgtgagccaccatgcccagcctctgcggttatttttgatggaacaaatatttatcaaatatttgctgtgtacccatattttatgatgtcagcccattccttaaaaactcttacatgggctgggcacctgtaatcccagcactttgggaggctgaggtaggcagattacttgaggccaggagttcaagatcagcctggccaacatggtgaaaccccatctctactaaaaagacaaatggccaggcatggtggcacacacctataatcccagctactcgggaggctgaggcaggagaatcgcctgaacttgggaggcagaggttgcagtgagctgagatcgtgccactgcactccagcctgggtgacagagcaagaccctgttttaaaaaacaaaaaacaaacaaaaaaacaattcttacgtggttcctcattatcgtcatgcaatagggtacataagcctcttcatagcctagcctgtccctacaattccagcttcactccttgctactccccctcatatctggccatccaccattttgaactggtcagcatagtgtaatgtagtcaacacgtgcaaagacttcagaatcaaaggcctgggtgtgaaccagttctctccacttacttaaccacattatcttgaaaaaatttaattcatctttcagagcccctgtttcatcatctgtaaaactgggataacaatacttctaagatcattgataggattactttggttatttaaaaagcattcctgtgccattactagtaatatttatcattttaaatgatgacaattattactttcctcagaaagcttctctgccctccccacattatggaaggtgcccttatagctcctgtgcttatctcctaacagtgtaaattcctgttgaatgttcatctctaccactgagcgtgagctcttggaaaacaggaccattgtttctcgttcaacttggttaactgcaaaacattgatgataaccaggaaatgcttgttggttgaaaggaaaagaagaaagaagtaaagcaataagcaaggtgctgtgggggccatgaacatggcaaaggcaaagcccctaccatccagatgtagaacctgtagctggacagacaaattgcagattgctatctttgagtctcctgtaaggatgaagtatatttatgagaggggaaaaagaactttaaaaaaacttattttttccttattgtgggctatatcatacatacaggaatgcataaaagtagtatgtagagtttgaggaataaaatgaacactcatgtaaccaccatgcaggaaaagaaatagaagagagttgcagaagctccaccctccccatatgtctcccctgtcacagcttccttcctctccccaagaagtaactcatgtcctggatttcgtgataatcatttccttgcttctctttatgactttattgcctatgtatggatccctaaccaatatagctttgtttttgaaccttatataaactgaaccatactgtattcatattcttgagactggcttgtgtctctcaagtttgtgaaattaatccatgttgttgaagatagctgtggttctttttcttttaattactatagtattccattatatgactatgtcacaatttatccatctrttgctaatggacatacaggatttttccagttggggaacgacaaacagtgcttccgttaatattgttgtatccattttctccactatctgaacatgcagcattctttttgttgatattgttgagaattcactctacctctggaagcagtgaaagccctaggggaagaaaaattcaaactagtttgcacaaagaagatttaaataggtagacaagagtctcaaagtgtgcttgtaaatgtgtgtttgaaaactttgtgtttctcaaagtgtgctccaagatggcccacaacaaaatcatgtggagaatttgttaaatatacagattaaagacccagcccaaacccaccaaccaagaccctctgcagttatggcctggaaagctgtgttttagcaagcttaccaccgcccgccccccacatgactcatgtagatcaccaaccctctaccttttttttttccttttttcgtttgttagcatttagttaagctccctccttgtggcttsaagccaccagaacacagcctccctacctccccccacatatacacccttaatcttctcccagctctcctgccgaagaacttggccttcgtgacagcaggctactttgggagtttcccttcctcagaattctgcagtagcccatagcactccatcaatgatgggagcagctccagcctgttttatttattattatttttttttgtcagcgtgtgattactcatgtctcctgactgaccaaggtccacatttgtcaaggtcaagagttgggcagaagctctggtttctctttaagaggtaatgcctcataaccaactttaccaaagtaacctgggtgacactcatggaagttgatgcataccaccagcatttccctggcctcccaggtgcttcccgtgcttggccaggcctttactttctgtagatgatacaggtgtaatggaacaaatctcagcggtgggtgcgttaggagaggagaaggggcagtactttcgtgcccagaaaatcagcttcccttcatatgtcctccttgggctagcatgccaacagtctccaagcggactctaccttagcacacctacacactgcggtcctagtcttttgctttcttctccacatctctctccctcatccctcaatctctcccctattcccaaatgctgcagaacactcagaagtctcattttaagtaactccgaagtctttccatgacccctagcaatgttttacctaaataggcacttattgttttaaatagactttcctttttagagaagtcttagcttcactgcagaattgggcatagagttcccatatactagttacactgctctaaaaatcctgtgctctacctactcatcccaccccccaccgccctctgttcatcgatcattgatctttttaaacctgcctccagttttgacttttccagaatgtcatataattggaaccatacaatatgtaccctcttcagaggagcttgtatcactgagtaatatatatttaagtttagtgctgaataatattcccctgtctatctggatatatcagtttatccatccattaaaatactgaagatcatcctgggtgcttccaagttttgtcaattatgcatgaagttgctgtcaacatccatatgcaggtttttgggtagatgttcaggtttcagctcatttgggtaaacaccaagaagtgcaattgctaaaaagtatggtaagagtatgttcagtttaagaaactgcagtgtcttctgaagtgggtgtaccattttgtgttcccacaagcaatgagtgagagttcctattgctccatgtcctcaccagcatttggcggtgtcagtgctttggattttggctattctaatagatgtgtagtggtacttcattgtttttttaattgagacacctagttttaaaactactcttcacttttttctctgtgttttggggggggtcttgtgttttaaaattttgcagagcaaattatgagcaagtgatagtgttctttcattattaaacatgatttacagatatttcagactaactctctttttttccttttaaatayagataaatgcagagggaacaccagaggacgtttttcttcaactctgcacagctattgactctattttctgaaggcaaaaatgcatgtttgttagaatggaaacagaaaaacattaaaaagttcattccttaacacaatgtttcaagttaaaccttttgtgtcaccgcccccaccaaccaccacctcctaaatcctgacagcactgtttgcttcccagctagacctgtgtgagaggtgtctggaaatcatgcatggtgtatttgggactatatcaacctattctccacacttcagacaactgtctgcactcacggcacacacactttgtatcatgcaggccacactcagagctagtcagtacatgaacagtggtgcggtgccagtctgtgtccgttgtgatcacaggccttgctagaccctgatcatctggttctcctctcattaagcatccctaacccccagtcacaccttcctcttacatactgttccccaatggaggcccctggcataggggacagccctgggcatcttcctttggtgtctggctgttttgtcaactctcatccactggtggctcagagccataaggtgggttgattacacaatgccttgtacatgatatagaggcatcaagcaagtaaaatttgacagaaattttaaaatatgaagatgtatagctttcccaagatgatggtaaaacccaggttagtcatcagtaaccttctctattattattattttttagaaacttggaatactgtcrtyatggctaagagaacaaatctgataaattgtgtaacctagtctcttctctacatggtgatgcatttcagcaattataaattaatataaatgaccaaaagtaacttaaaagcatgagatatttgctatttcattcattgggcacatatcaaattataattttgattttaaatggtcacccatgtatttatttgttgccaagcaagtaaaaaaataccctaacaaacctgatgtgggtgggaggggcatgtcagtaagtggtgtgttcaatgtgtttgtttcatatgggccctttccaggagtttgcaaaccttgtcatacccatatgcaaaactgtgtttccttgcattaaaccagtgaagtttgggttctcttttgtgctatcaatcagttgtaaaatcagagctkcttayatattctactggaataactgcatcttccactcagtcactacaaaaaagcatagtttcagtttgcatgaatttttttttttttcttcaatggytgtgcagataaggatccatttctgggatagaattgtattttttaagtcatttttttttcttgaaatggatatgtacaaataaaataaatggaagacaggataactctttttctatttatttgtaactcacatcattctggaaagcatttgaagccttattccaaacagaattagaagcgaacacagaaatagtcaagatgatttacgatacgcttatatggttttaattttagctatagatcagttttgagttattacagagagaactcaatgtattcatgatacatggtaactgtcatatttcctctttctctagcactcattctgaaacagaaatgttagtgtttgctaaagaagaaattaaatttctttggttacagttacgcctctattaacaaaaaggggcatgttcccataactcccaacagttgtcaaatactttaatactaccccaagttgtcacactctctatcggggagcataataagtacctgagcaaactggaaaaaaaaaaggttacaggatgaaaatcatcagttgtgccagaaaacataaaatgactctttgtagggattgacattcttgaaacacataccatatactggcagacacagtccatgcccagcacagctctgactgcacaggtaaggaaaatgagacagcagaggggcagaaaggtccagccatcttttacaggcttctacggctgtagctgacagccaccttgaaaaatttagcaagggtaaatggctttgcccctgaagagtatctagaagtgcaaatcaactcttctctagaacacattactgatttgaatggcttgaaatgatatcactactttaaagtcataagattttaatactggaaaagaccttagaggtctctgtctagcgaaagacctgtgtgtatgtagaagacatcagaacacaatctaaactcctttacaatgatgtgttttcaaggccacatctgagctggcttgtgccctcttcgacgccatcaactactactctcctcttgctcatttggcttaagctactctggccatcttaatgttgccagaacaagccacggtctactggctcagggcccgtgtgctactgctatccttctgccccttcctacagattattcatgcagcaaattcccttgctctattctggtttctatttgaatttaccctggccaatagaggatttctttgcttattccatctaaaatggcagactattccccattctcccattattatttttctctgagcattacttatcttcaaagcatttatccctgcctgaattgaagtaatagtttttatttacttacttattgctggtcttctgcattagattataacctccataaggacacggcttggtatctccagtcccacacacagtaattattattgagagctaacatatttaacatactctctgcacctccagttttctcatgtatacaatggagaacataatagtaatgaacctcatagaggaactgaggattaaacaaaagttagtaagacacacgaatcatttactagctcctaatgtgcaatgaaaggtagttctttgtcaacacttactgagtgcttcacttccacaactgggactaagacccagaattttcactccagtgtcctttccattaccttgcttttttttttttttttttttgagacagcgttctcccccaggctattatgccatggcaccatctcggcttactgcagcctcaacgtcccaagttcaggtgattcccccaaactcagcctcccgagtagctgagactacagccacgtgccaccatgcccatttgtttgtattttaagtaaagacagggttttgccatgttgcccaggctggtctcaaactcctgggctcaagcaatctacctgcctcggcttcccaaagtgttgggattacagacgtgagccaccatgcccagccccattacactactcttaaaaacatggaagagaatcaagatacacagcctatctagggtcccacagagaaccaaaaccacctctgccacccagggttgaatcacagcctttgggtaagatagagtccaattcccctgtcctctcacagaactgtcaagatgaccttctgatgcaaggcctctaaggatctcacagacacactcaatcataggtggtgtctctcaagttcctggaggaaaaaaatgtaaactcaccaaaatgttggtcatacaaccaacacatatttattgagaatctattaaatgccaggccctagagatacagacagacatggatcgtctctgttctcatggagctaaatgtattataactctgaaaactctagttaactagctacattaactgtagaaaaaaaaagttgtatcttttttctgggatcatataaatagaagaacatttttcatcaagaaataaaaacagtttacagcctaaacagaacaatgtcttcataagcttgtggaaaaccctactgaaatctgaagacttccaatcccatccagtgcatctatagatgaacaacaggcttcaaacttcaatatccacaataagaaatagttttatatagcacacaacacatatttatgattgaaaaagacatttcacaaaacaatatttatctttattacatgtgatgtaccattttctctattccattttttcaaatgttcatacctagtaaatttttgtgttctgtgaatcaatttaaacaaaaaggggaaggggggaaaacagacaaggcatactattaggttaagtgagaagcacccaacatgcatagaagaaaatcctacccaaggcaggaaacacaagccttagtcccagctttgcctgagactttgcaagcctggacatatgctcaggtttgtactcttaggaagcacaccacatcaggaaaacagaatgtaaggcaacatctgcacacctccactcctaacacctagtgttgcctgacacaaggggaaattcctgctcaggaaacaggatagtaaggcagacgctgactctgaagtaatctgcctaggttaaaatccaagcatgaccactttactaactatacgaccttgggcaggttaattaacttctctctggcgagatttcctcatatgacaacaggataataaatgaccctgcctcatagagttgttaagaattagttatcatatgcttgcttggcacatagtaaacactgtatcagtgttttctattattatgcatcacacaaaaggaaacctcctctacctaaatcttacaacaatggttttagatattaaaagtttcttaagatgtgcaaataacttgagcacaatatatcaggaaatagatcttatctactgaataccactgaataagcaatgctttagcaagtaggtcttttacagtctgttttagcttacagtccaataattctatgtaggcagatggtagcctaccggcaaatgacagctctgcccattattcctgcaactctcaaattaaaacaataacaaaacactacctactactatctgaacttcagggccttttaaagccatgggggctrtttccttggagctgaaaaatgcaaaacaaacacatcttctgctcaagccgaaaaatcttcttaactcaaaaatctcaaaaaatgtttgccctagaaaaatgcattcaaatggtttgtctattccatttatataacaattgtatcactcatatccctcttccaaagcatacatcatactttatggaatttttgaatggatctgaatggctttccaaaactaactggtattatttctacacaaacatagaagttaccatcaagcattactatcttgcctaattacaagttgaaggcagatcttctggcatattcacaaaacatttaatataaaaacgcccagaatgctaatgattcccctcttcacccactaataattccagggtgagaagttaagctcaagtccatttactttccttctgttatgatatattatatctatatcatcagtgatctttaatcaatatattactttaaaattctcatatttctatatttaaaattctattacttttctcaattaaaaaaaattcagggtatgattttagtaccctgctatgtactgaagagaactagtaaataatgttcccttgatttaaaataggaaaaaacaggtgattctaaaaattgggtcaaatataacaatcaatcttagaatatttatactatcttttcctatagttaatagtaatttccaggaaacaaggtgatttttcaaaagccatctgtttaaatacatgggggcttatcttcatgagacacaactagaaaaaaaattttcaactttagttttcacacctgagcattaataattgcctttttctttaaccatggtccgtgtttcctttttgtaagctagtttaatttagtgtttcagcacacactgagtaaaaatctttaccattttttacagggttgcttaagatcaccctcttttccataatacattccttattcttcataaatgacagaaagaaaactcttaaatatgtgaagcaaaccattttaaaaaataccaatttctggttttaacactggtaaaaaaaaaaatccaaaatctaaccaaaaggaagtcacaacaagcattctataatataaacagacagtatccacatagtttatttctcacagttctcctgacaaatgaacatcattcaagaacatactgtatacacagataagaagaaacatacaaaatgttttaaatgatgcacaacaaaatccagcagtataaaagaatgcatgtgaacccttgctcactgtgcagactaaatttaatcacttgtttaaatagtaataaaaatacaatcttttatggatcttgtgcagactacaaaagagggaaattattaccatatatatgatttttatattaggcagttttctttgatgagttgtactgacaactccaaatacagaggcagaaggctgtgtattttaaaggaattaatgttgtgaattagaaactttacacagttactaccactggcacttttcaccatagtttgtacacatcacatgatcatcttatataacattacatttaaaaaatatatctgagtgacaattttataacattcacacaccatgagctggttaaggaagcaatgccacagttgcctcctgtagtgcttcactgttggtaattaaggacaattcattgtggttaaaagaaattagatatcaatatgattaagcagctccaatttactaaaggccatcaatgaccaccactgggacagtgagttcttttaaagtgtatatcctagaagcaaacaccatcattggttaaaactttgtctaaagaagtcagtttctgtgctgaaaactattttcacaaaactgaaggctactaaactgttttaatataaatactttgtcttctcattatcatatttatgaccaagttctttgaaacctttggaatttactctctctttaatgtgtgctctcgttccatctcacccatttaagatcaccacctaaaacgcagtggtgaaaaattcaccagggaaacctttgctcaccaggaatgttcagctgctgaacagtgatctagagccacaacggtgcagagctgtacttgacgagaacactcaggaagctctcatgctgtgagtgtcatttctgggaaagcagagaatctttccaaactgtgcacataattaacaatgataccattgctatgtgttgaagaggactagtaaatgatgttctcttccatgtcatctgtttgctggaaagtagtttgggtcaaggtaattgtaactggtgccctgagacacacagtagtctctgtctaagaatgtctctgacctataaataggttctaaytggtgatcttccttgtgaatatctgtttcatgtagactgtaaagaaaaaaagacacacatcattacatggtagtggatgcattttagtctgtgtattacaaagcttcctcacagctctccctgtttaaatccattaatctatcaaaatctccaacggaaagttacttgacatgtggtatgattacagaaaaaaattaattgcctagaacaacaaaatttaattcactaagtgtgggtattaatattttctatgtttggaaatcaaattcactaatggctgagaagctcttttcttgtctaagttgaagactgacaatgaagaaaacacttaccagtctgaacaagaatcacagaaatccaaagacatttctggaggacaatcctggcaatgccaccgaacaccctggatgggttctatgccacagttatcacactataacagattcagagagaaaatgtattaagttatactgttccacgatcttttttattttccacaaggaaacacatgatgtgcacacagacatcttctcttctctctccatgcacaggacagtaatataacacacaaatggttatgtgttagagacaatttctagcaaactaggtaaaattccatccactcaatatcaagatatgggtgagtgagaggaacattggaagggataa

SEQ ID NO: 94039 - DNA, 349863 bp, Homo sapiens
  misc_feature (1)...(349863): n = A,T,C or G
nnnnnnnnnnnnnnnnnnnnnnnnnnnnnnnnnnnnnnnnnnnnnnnnnnnnnnnnnnnnnnnnnnnnnnnnnnnnnnnnnnnnnnnnnnnnnnnnnnnnnnnnnnnnnnnnnnnnnnnnnnnnnnnnnnnnnnnnnnnnnnnnnnnnnnnnnnnnnnnnnnnnnnnnnnnnnnnnnnnnnnnnnnnnnnnnnnnnnnnnnnnnnnnnnnnnnnnnnnnnnnnnnnnnnnnnnnnnnnnnnnnnnnnnnnnnnnnnnnnnnnnnnnnnnnnnnnnnnnnnnnnnnnnnnnnnnnnnnnnnnnnnnnnnnnnnnnnnnnnnnnnnnnnnnnnnnnnnnnnnnnnnnnnnnnnnnnnnnnnnnnnnnnnnnnnnnnnnnnnnnnnnnnnnnnnnnnnnnnnnnnnnnnnnnnnnnnnnnnnnnnnnnnnnnnnnnnnnnnnnnnnnnnnnnnnnnnnnnnnnnnnnnnnnnnnnnnnnnnnnnnnnnnnnnnnnnnnnnnnnnnnnnnnnnnnnnnnnnnnnnnnnnnnnnnnnnnnnnnnnnnnnnnnnnnnnnnnnnnnnnnnnnnnnnnnnnnnnnnnnnnnnnnnnnnnnnnnnnnnnnnnnnnnnnnnnnnnnnnnnnnnnnnnnnnnnnnnnnnnnnnnnnnnnnnnnnnnnnnnnnnnnnnnnnnnnnnnnnnnnnnnnnnnnnnnnnnnnnnnnnnnnnnnnnnnnnnnnnnnnnnnnnnnnnnnnnnnnnnnnnnnnnnnnnnnnnnnnnnnnnnnnnnnnnnnnnnnnnnnnnnnnnnnnnnnnnnnnnnnnnnnnnnnnnnnnnnnnnnnnnnnnnnnnnnnnnnnnnnnnnnnnnnnnnnnnnnnnnnnnnnnnnnnnnnnnnnnnnnnnnnnnnnnnnnnnnnnnnnnnnnnnnnnnnnnnnnnnnnnnnnnnnnnnnnnnnnnnnnnnnnnnnnnnnnnnnnnnnnnnnnnnnnnnnnnnnnnnnnnnnnnnnnnnnnnnnnnnnnnnnnnnnnnnnnnnnnnnnnnnnnnnnnnnnnnnnnnnnnnnnnnnnnnnnnnnnnnnnnnnnnnnnnnnnnnnnnnnnnnnnnnnnnnnnnnnnnnnnnnnnnnnnnnnnnnnnnnnnnnnnnnnnnnnnnnnnnnnnnnnnnnnnnnnnnnnnnnnnnnnnnnnnnnnnnnnnnnnnnnnnnnnnnnnnnnnnnnnnnnnnnnnnnnnnnnnnnnnnnnnnnnnnnnnnnnnnnnnnnnnnnnnnnnnnnnnnnnnnnnnnnnnnnnnnnnnnnnnnnnnnnnnnnnnnnnnnnnnnnnnnnnnnnnnnnnnnnnnnnnnnnnnnnnnnnnnnnnnnnnnnnnnnnnnnnnnnnnnnnnnnnnnnnnnnnnnnnnnnnnnnnnnnnnntgtctcatagccttccatgactctcaccctccacccaggcatcctggttctagattcagtcctcaaggctgccatatctcagagccttccacgactctcaccctccacccaggcatcctggttctagattcagtcctcatggctgccatatctcagagccttccacaactctcaccctccacccaggcatcctggttctagattcagtcctcatggttgccatatctcagagcctttcacagctctcactctccacccaggcatcctggttctagaagcagtcttcccctctgcaatgtctcagagccttccaggggactgcgaccctccacccaggcatcctggttctagaagcagtcctcccctctgcaatgtctcagagccttccaggggactgtcaccctccacccaggcatcatggctccagaagcattccttatggccaccatatctcagagccttccaggggactgtcagtttccacccaggcatcctggctccagaagcagtcctcccctccgccatatctcagagccttccaggggactgtcagtttccacccaggcatcctggctccagaagcagtcctcccctccaccatatctcagagccttccaagggactgccaccctccacccaggcattgtggttccagaagcattcctcatggccaccatatctcagagccttccaggggactgtcagtttccacccaggcatcctggctccagaggcagtcctcccctccaccatgtctcaggccttccaggggatgtcaccctccacccaggcatcgtggctccagaagcattcctcatagcccccatatctcagagccttccaggagactgtcagtttccacccaggcatcctggctccagaagcagtcttccactccgccatgtctcagagccttccaggggatgtcactctctatgttctttccagtggtgagtgagagggcttgctccctgcgatgggtttctttgagtggccttgtcatgttcccaccatgaggacaaaatactgaagttatttatttaatatggatatttaatatggattcaagtaaatggcatctatatccacaggtgtttgtgtaagtgctagcaaacataagtttaaatgttcatgcattatattttaattttatggaaaatcattttgaaatagtgtggcttcttgtcatgaatctggctgcccccatgtctggagttttattttgtttgtctgatgttttgacatcatcctttcttttctctagggagggaaagagttgtcaacatatgattttatgtttttgtattacattgaaaaataactttggtgcctattatccagctgtttgctgagaacaggtgagcaccgtacttgaggctggctgggcgcagctcactgggcagggagcccaggctgtgagctgcagcctccattctggtctatgctgcctctgtttaatggagcagttacttatacgtctcagtggacagaatcaaagggtgatctgaatttattccaggcaatttctccttttctttttcttaactcatgagtgtgaatattctttaatgaggatttttttattttgagatatttttggtgttaggaggacactctccttccctccttcctgggagtgctgagcatttgtgaacagctccctctatggaatgaaacatccacaaagtgcatctgcagcttttcacaacgaaaggagaaggaagaggctggtgcacgctctgataatagtggatagtactatatgcaaaggttcttgtagaaagtactgtatgctaaggttctcgtggatggtactctatgctgaggttctcgtggatggtactctatgctgaggttctcatggatggtactctatgctaaggttctcagatggtactttatgctaaggttctcatggatggtatggtatgctaaggttctcgtggatggtactctatgctaaggttctcgtggatggtactctatgctaaggttctcgtggatggtactctatgctaaggttctcgtggatggtactctatgctgaggttctcgaggatggtactctatgctgaggttctcgtggatggtactctatgctgaggttctcgtggatggtactctatgctgaggttctcgtggatggtactctatgctaaggttctgatggtaccacatgctaaggttcttgtggatggtactctatgctaaggttctcagatggtactttatgctaaggttctcatggatggtatggtatgctaaggttctcgtggatggtactctatgctaaggttctcatggatggtactctatgctaaggctctgatggtactatatgctaaggttctcgtggatggtactctatgctaaggttcttagatggtactttatgctaaggttctcatggatggtatggtatgctaaggttctcatggatggtactctatgctaaggttctcgtggatggtactctatgctaaggttctcgtggatggtactctatgctaaggttctcagatggtactctatgctaaggttctcatggatggtactgctattctcatggatggtactatactgctaaggttctcatggatggtactgtatgctaaggttctcgtggtagggtggtactttctcatggatggtactatactgctaaggttctcgtggctggtactgtatgctaaggttctcgtggatggtactttctcgtggatagtactatactgctaaggttctcgtggatggtactctatgctaaggttctcacggctggtactttctcatggatagtactatactgctaaggttctcgtggctggtactgcatgctaaggttcttgtggatggtactctatgctaaggttctcgtggatggtactttctcatggatagtactatactgctaaggttctcgtggctgctaccctatgctaaggttctcgtgggtggtactgcatgctaaggttcttgtggatggtactctatgctaaggttcttgtggatggtactttctcatggatagtactatactgctaaggttctcgtggatggtactctatgctaaggttctcgtggatggtactttcttgtggatggtactatactgctaaggttatcgtggatagtactttctcgtggatagtactatactgctaaggttctcgtggatggtaccctatgctaaggttctcgtggatggtactttctggtggatagtactatactgctaaggttctcgtgggtggtactttttcatggatagtactatactgctaagtttctcatggctggcactgcatgctaaggttctcgtggaacatcagtatagtctggggactgtgacatcattctgatgccctatcttgcactctgttgtctcctgtgaggcagacctgatacatgacacgatgctcagcaacataaatgtctgaactgaagagacgatggagaggagacgccttagaggagacatggccataagttgaggcaatgggttgtgatcatctccagcagctattatcatttactaatgagtcggcactctgctaaatgctttatttgcattctgttatttaattctcacataaatcttttgaagttagtactattatcatccccactctttggataaggaaaccgatactccaaatttaaaacctgctcaagatcacatggctgctaagtggaatgaaagggagtaaaacccagaggtctcactgcagggcattaactcttaaacactgagctgtgttagcttcccaaatttcataatggtatcactactccttaaaatacatctgaacataaatttgtcatgatctttgatgggtattaagtttctgcagtcaaaaatttgcagtagagtgagagttataataaaaaataaatgtggtaaaaataatactaggctggtgcagtggctcacgcctgtaatactagcactttgggaggccaaggcaggcaaatcacttgaggtcaggagttcgagaccagcctggtcaacatggtggaaccctgtctgtactaaaaacacaaaaattagctgggcgtggcagcgcacacctgtaatcccagctacttaggaggctgaggcatgagaatcacttgaacctgggaggcagaggttgcagtgagccgagatcgcaccactgcactccagcctggcgatagagcaagactgcatctcaaaacaaaacaaaacaaaacaaaacaaaaaggcaaacaaacaaaaaaaatgacgtataatccctagggggaattcaagtgaacaagggagtctgcgatgcagagcgggagcaacctgtgctgctcacagcacccccaagccacactgcaatgaggaggaagagagagaaaagcttaaccattcaaccctgcaagtacttactaagcacctcttacagcaggtgcggtggtcactggagaacactaaggaaaattagacacagttcctttctgcaaagaatgaatacaacaactgcacaaataacaaaatacaaatgtgactgccttgcgtgagaagttctgccacgtgctgggagttcagaggaggaagagatgtctaatgcagagggtccccgaatgtgaccatgaggcagtgacatgcaaggggactcgagcctggatttcagcagtgaccatggaggcagtgacatccaaggggactcaagcctggatttcagcggtgaccatggaggcagtgacatccaaggggacttgagtcaggatttcagaggtgatcatggaggcagtgacatccaaggggactcgagccaggagttcagcggtgaccatggaggcagtgacatccagggggacttgagtcaggatttcagaggtgatcatggaggcagtgacatccaaggggactcgagccaggagttcagcggtgaccatggaggcagtgacatccaaggggactcgagccaggatttcagtggtgactgggaaagggggggccccagaaacaaaggcctggaggtgacaaatcccagagcagccaggcctggcttggctggaaggtcagggatgtagaagcacaccaagggcagaggcctcaaaagctgaggtgcgtcctccccatgctgatgagcagcccccacagcctagcccggccgtcagcaatctatgctctctctctctctctctttctttttattctggaygtttcatataaatggaatcacacaatatgcagtctatagaaggatgaagagggactttacccagaaacgtgggagttcccaggaggctcctgaaggcagtgagacccaaggggcggggtcagttggacagaggggcagcagctgtcgtgcaggggcctggcctatggtggccacgctccctgggacagtgggaggtgtcgcaggaggccccgtgggctggtggttgaaggaaggtgtcagccacgcacccagagcacagcggggcatcaggaggatctgaaacagcgaatgatctccttgcaccttctgtttagacggccaccccaatctgtagacaatatcgaagggccacaaaggtggacaaggaagggaacgggccctgaggctccttttgttgcccgtgactcccagacataagcaaatctcagcaccgaggctgccggctcatcctgcctactgcacagcttggcccaacccttttcctctttccagttgcttcagctccacttccactcagagcttaaatataatagaagaacgggttcttaaggtacagtccagactatttacaactagctagctaaagatggaaaatgagacgatgtaatgatgtgtggtttgacacataataacagaatgctaggctgtaaccttgcttttttctgatttacatttatattgcagaagctgacaacatctggaataagtaaacattacattttctgtcatgaaatatctaaaagccacatactaaaacttttagttttttaaaaaatgaaaggcagtagaaacatctttgcattctgacataaaggaaactttgaatgcatctggacattgttttacacaattaatatgaaaatttaattttgccctatgtaaacttgctcagctgtaaacaaacaagccatcatggagactagatcaaataataagctcgttgactccaygctagagtaaacaaggacatcagagtaagtcatagccctacagatgttagacaaaaggaaggatttttacgtctttattgatgtaaattacatactgtaggagtcacccatctaaagtccacaacttaataggttaatatcttcacagagttatgtagccatcaccatgacttcattttagagcatttccttcaccccagaaagaaacaccacaccggccaggtgcrgtggctgacgccttaatcccagcactgtgggaggccgaggcaggtagatcacgaagtcaggagatagagaccatcctggctaacatggtgaaaccccgtctctactaaaaatacaaaaaattagccaggcgtggctgcgggcacctgtagtcccagctactcaggaggctgaggcaggagaatggtgtgaacctgggaggcggagcttgcagtgagccaagatcgcaccactgcaccccagcctgggcaacagagcaagactccgactcaaaaaaaaaaaaaaaaaagaaacaccattcccattagcagtcacgcagtcacaccccaaccccaaccccatcccccactcctagcaaccactcatctcctttctgtctctatcgaattcactgattctggacatttcacctaaatggaatcatacaagatgtggcctaagaaagattatctttcattgtcatattaatagctataaacccataataagaaatgtcttacactacagcttaaattgctattcctaatgagaaacatggggaagaagtcccgttaggcgttgtcacaatgtctaaacaagggtctctgagaagcttctagctctgctgagtctagcatgggagttcctgcaggctgcttaacggagacctcatctactttgtctaaacaaaccaggaacggtgtgggtcctggtcacctcccaggtgccctcagcgtgttagggtctccttcagcctctgatgactcaacagtctggtgtcactggacatgtcctaagtatgtactttctagtggtttgcagtcaatatcatgtaaagtgtggtacacacactaacacacacacaatcataatgtaacagtttccacctgcagtgacctgtgtctattaaagggctgcctgacacggactcacagcattggtctcttttcaaagtcattctgtcacttatattacatagattttaaagtctgataaatgttaccaatcttagaaaaaaaaattcaggaaaatagcttctgttctgactagcttaaaatttttatttgctattaattttaattagtgtaggaagttaaaatacaaaagagagagctaagaaaatgactcaaattgattgaatatgttgtcttcagacaactggtataccctttgggaggccgaggcaggcggatcacaaggtcaggagatcgagaccatcctggctaacacagtgaaaccccgtctctactaaaaatacaaaaaattagccaggcatggtggtgggtgcctgtagtcccagctacttgggaggctgaggcagaagaatggcatgaacccgggaggtggagcttgcagtgagccaagatcacaccactgcactccagcctgggcgacaaagcgagactccgtctaaaaaaaaaaaaaaaaatagaaaggtgccaaaaacaaaaaaaaatwatttcgattaattataaagagccaaaagagcaacaaacaagaaaaggaaggttaaaatgttgtctttactgaaaattcatttttcgttattgacaattcatcagtaatatttatacacatgcatatccgatacaaatgtgtaagataaaatttttgagtaaacattttaaagagaagactaagtttattttctattaggaaatttcatatcttttaagaggaatgaaaacgcctatgtttatttttaaaagtacacgtacgtacagaaaaggagaggagagagagcagggcttgcaacagtgctgacagtggccatctctgggcaaaagaaatgtggacagttttcatttcaatttttttacttcctcraagtttaaaaagctctataatgaacatatattactcttgggcaagaagggattttttttttccagaaaaacactaacaagtgctttctttgtctttcctcaaattttgtgcgtttttctcattgacaatggatggttggttttcagagatgactttgtcatgctagtaacaagttttctggagctttttgagattaagttcacaacattgctgtaagtcatgtttggaatcactttctgcccttccagttgttgtagaaagcaaatcgccacccatggcccttctctgcctccggctccccgaccacaggttgcagagaaggatggggtgcatctgtgcccaggtgtgtgcgaygcctcaccacatggaaggacagccagctggaggcacaggacatgcctgaactgtgctgcaaactagaagacacaaaatatctgggtttttattccagaaaactgtcacggacacctgtaatcaagaccggtatttctctgtccattgtagaaagagatccaatcctcttagtcccaacttaaactaagattttcacaatatcaaattttcatggaaactgccttcagcataataagtacaagtaatttatctgataaaagaatgtcaacagcaagtacagtataatttgtgtggtgacaaattgtacccatcctttccaggaagaaagacacactgctgtgtgtggaatgaattggggcaaggtcaagtagaagcacttgtgtttaatatgcagctcccagaaacatcactctatcctttcagaagatagatgcaaattatagctaataaagttattataaataattgctgcttctcctctcctgcatattcagtgagtttggaatgggaggagaggcagttatgaatgagacacctataaattatgaattaggagacatctgatgtggcacttgtcattgtccctaaattcagagatgtattttcatagattagcaatatcagatatgacatctgaggtcaaattgactgagagatttagccagccagggtgagaagtacaaggttgagaatgtctctaagatgctcacacagcacccgcagatatcttcgggaatgacaaggagaggaaaaggagcaggtgttaatttttcacataataagggctggaacaaatagcagacatgagtactacgaaggggaaaattagtcaccctgtagtattacgggcacaaatatctcacaatgaggtgggaggatccgaggtcctgacaatgtctgtggagaccctaacctgtgtcaggtcctgagccaggtggggaaggcaggaattcgattccagcagcttctgctgataatcaaggcacaatgccaacaggaagcaagcgacagaggcttgcccggtgctgtggggggaaggaggggtccacccggcgtcagagacatgagtaccaggcagccctcttccaggaatagtgtccagcctgcgacttgaaaccaacagccagggtcagcaggagacccagggcagacagagtctgagtggaggctgcacggaaccggggcaggtgacaagcaggtttccagagagcaaccagagtcagtctcagctgcagggagggcagcctcgaggggaggacccgcgaaggagcagaaactgcgggggcagcagggttcagcccactggagcgacagcatgagaaggggcgaagggggccgggtccagcacgtgccttgccctgtgagctggagggagtagggcagcatggcctccgctgagtcaggcacggtgagggcacagacccagggaggggccagacgggactcacaattaggcccacagccagcaagccacggacrggactcacatccaggtgtctacagtagtcaaactgttggaggctgaaagtagagtggtgatcaccagctgtgggagggggactgggagtgttgcccgacaggtagaggatttcagatttgcaagatcacagagagagatctgctgaacaacaatgtgagcagagtcgacaccactgcagtgcacacttagcaagagctgagaaggtacattgcatgccgtgtgtttctgaccacacacacactaagcgagattcaggcccaagtcgacctccaagtccttgctctttcgcagcagccgctagccctgtgattgagacccagctcctgcctgccgggcctcacgggcctctgccgtcaatcaagtgataagatttctcagaaccgcagaagccctaatctgacctgttactcttcgacaccgtttaatataatgttttagacgtgtttgccactttttatataaacgcttatgaaaatcacgtagagactgttaactaagtagacgctcaggtacactcaccattttcagcaagataaaaatggccaagcgcgggtcccgcagctgctaagcctgttctgtgtcccgasctcctgagagagtccccaggctttgccttcccggcttcccggggttgaccccaaattcatgtgttcctggcgctggccccgtctgttaactccagctacgggagaggcgctctgtggcactcctggagcaaaaacatccggaagtggcccaaatcctgcggaaggttttccgggagaatgggaggtgctcgtgtcacagggcacccgaactcccaaggagaagatgaggactggaggaggccctggaggcgacgtgcgcgccccgcggtggggccgtctctgtgcggtgaggctcccgcctgyatctcgcagcgggaggtcatcgggcaagtgcgttgctgcgctgctgragagaacgctggaagaggcgggaatcgtgccacgccggggggcgccatctttgtaagaggtcaggaccaaagtgggtcagaactccgttcctacagtgtacgtcgcatctccctctggtaggacctgctgtcttagttttcgtttgtggtttggttttgtttttcggcctagaagttggtgagtgatgctgtgtgattccagcaggaagtcccgggtgctgtcaccacggtgggcacccagcggccccgggcagggctgactgcatgagtcactgccaccgctgctgtttgtggcaccctgccatgtgaccgtgatcttctgtgtcacatgacacaggttttttgtcttttctcaaatkttatgccttctttctcattgacagtggatggttggttttcagagatgaatttgtcaggtaagaaattttctgargctttttgagattaagttcataacattgctgaaagtaatgtttgaaatcactgtttgcccttccagttgacatagaaagcaaatcaccacccgtggcccttctctgctgccagttcccccaccataggctgcagagaaggccaggggtgcatctgtgcccaggtgtgtacaatcaagcatacacttcaaggtgttccttgaaacagtcaagagaagtcctttatgcctccccgggttttctcgactgtttcaaggtacacctcagagtggggtgtaccgcccaggttggccaagatgcaatggccagccttgacagtctcggccgtgggcttttgaactgagccgcattaaatcccagccggtgctggaagacactcaggcatccccacagactttcatcagacctcccagggcagcccccagcccttccacatccattggtcagctgtggtctgcgggtcctccggagggcaggcagtagtcacagctgcagttgtgccccttgggacatcacgctggccttgggcagagcctctgggagaaagggcccccagggcgcagtcctcagttgtgttgccttgctgcatttcctcagagcccagggcgaggccactccagacgcagctctgctcagcacagctcccgagtctctgacgytggccctggaaacgaggacacgtcagccacgaggacctggctctgtctgtccagctccaggtagtttaattgccggagcaaaagccctcacttgagattttggccgatggtccctctgccctcttcagagcttaggcgtgggttggatgagggtgggctgtgggcatgtcacagatccactgggccaggctctgagcagccgccctccgggaaccaagcccccctttctgggctaagcccatggtgatgatttccttagcttcttgtcctaggagcccctcaggtctatgtttttgtaacagcttttttgaaatgcaactcaaatggcatagcattcactcatttaatgtgtacaattcagcagggtttttatgattattaattttttgagacagagtctctctgttgccaaggttggagtgtagtggcatgatcagagctcactgcagccccaaccttccaggctcaagtgatcctcctgcctcagcctcccaagtagccaggactacaggcatgcatcaacacacccagctaatttactttctttttttttgtagagacagggtcttgctatgttgtccaggctggcctcaaactcctggcttcaagtgagcctccagcctcagcctccaaaagtgctgggattccaggcatgagctaccacgctyggccacaattccacagtatagcacattttagtattttcatcactgcacccaactttagaacattgcaccactccaaaaggaaactcatgccctttagctgtcaccctcacacctcacacacacctgtgtgtgtccctggccccacacagccattgatctgcctctttctctgtctgtggactttgctattctggctcacataagacctggccttctatgactgtctttcttcactgagcgtgttctcaaggctcatccacaatgcagcctgtgtcagcacatcaagttaccatgcagtatttcattttatcacaattagtttattctttcatgagtaaataggcatctgggttatttccaccttttagctatcatgaatagtgtggctatgaacattcgtacacaagcttttggcaaattttcatttcttggaagttacatggaatgcatggagctgctgggtgagrtggctgcttcctgcttcatctcttgagraattgctgcctggttttccacagcggctgcaccatttccctccgttctcttgtaaagcagcttcttgtggtctcttttaccagcactgtagaaatgtccaggcgtattgaagtcccactaaagctgaaactggagatgttgctttaattatactcacacaagctaggcacagtggctggcactatgccagctactcaggaggctcaggcagaaggattgcttgagcccgagaggtagaggccgcagtgagccatgattgtaccactgcactccagcctgggcaacagagcaagaccctgtctcaaaaaataataaataaataaataaataaataaagcagaacacctaagcaagagaatcagagtctgcctttaaaaaaatttatactagctgactgggcgcggtggctcacacctgtaatcccagcactttgggaggccgaggtgggcggatcacgaggtcaggagttcgagaccagtatgcccaacatagttaaaccctgtctctactaaaaatacaaaaattagccgagtgtggtggtgtgtgcctataatcccagctactcaggaggctgaggcaggagactcgcatgaacctgggaggcggaggttgcagtgagccaagatcgtgccactgcactccagctgggtgacagaacgagactccgtctcaaaaaacaaaccaaaccaaaccaaacaaaaccaaacaaaacaaatttatactagggtccaggcgtggtggctcacgcctgtaagcccagcactttgggaggccgaggcgggcggatcacaaggtcaggagttcgagaccagtctggccaacctagtgaaaccccgtctctactaaaaatacaaaaattagccaggcgtggtggtgcatgcctgtaatcccagctactcaggaggctgaggcagaagaatcacttgaacccaggaggtggaggttgcagtgagccgagactgtgccactgcactccagcctgggcaacagagtgagactcttatctcaaaaaaaaaaaaattatactaacacttacatggtatttttataatgttttttctataattcctttctgtctagtcatttattttcttcacaaaatatctgtgtgcttggataccgttatctgtatatgaaataatgaaacagaaggttttagagttttgaccaagtcacataacaaatatctaaaccgaagagktgcaccaggtttccaacccaaatttcagtgtgcaatttaaagtaataacagaggctgggtgtggtggctcacacctgtaatcccagagctttgggaggccaaggtgggcagatcacttgaggtctggagttcgagaccagcctggccaatatggcaaaaccccatatctaccacaaatacaaaacataaaaataaaaaatttgccaggtgtgttggcatgcacctgtaatcccagttagtcagaaggctgaggtaggagaattgcttgaactgggaagtggaggttgcagtgagccaagatcacaccactgcactctagcctgaccaacagagcaagactccatctcaaaaataaataaataaataaatagcataaagtaatgacagagtaggggaaagggagattaaaaagaagcatatgaatgtatttattaccactgaactgcacacttaaaaatagtaaagatggtaaattttacatgtatattttacctcaatttttttaagtataaaaagttttaaattaaaaaaaaaattgtggctgggcttcgtggcccacacctgtaatcccagcactttgggaggccgaggaggatggrtcgcctgagctcacgagtctgagaccagcctgggcaacatggtgaatcccccatctctacaaaaaatacaaaaatgagccaggtgtggtggtgcttgcctgtagtaccagctacttaggaggttgaggtgggagaatgatttgagctcaggaggcagaggttgcagtgagccaagatcacaccactgcgctccagcctgggtgatagagccggaccttgtctcaaacaacaacaacgacagcaacaacaaacttaaaaaaaggacataaaatgaaagtgcattcatggatgaatctaaaatgaaatctgcattcaaagagactgaaaaataataataaagtaatggcaggggtggcagtggttgggtggcatattgaggatggagctttgtgctttggagctgcggagggccaggggccacacggggcatgcagcgccggcagtgacagcaggtgggtgcgtgctgcggagagcaccacagcactcaggcaggatcctgggggtgcagcaaggactgtggatgcacctcagtgtttcttacagtgtcgtactctgcacataatagaaattcaaaaatattctttgatggacttgttccaaacatccaggaaacgactccyctgctgcttttggctgaggctgccagggcacacgcacaggttgtcttgcagaagggcagggtgtctagttgaagacggggtgtcggatgagtgcattaggctccatccacccatagcccaacttcaatgagaataaagggattgtttgaggggcataaacctaccaaggagaagagaatgggagaagacaaacagcaacagaagtttggaagatgaagtgcaggtagataagcagagatgacccacaggacggaggaggctgaattctaagtcagccctgcaaaagccaagggacaaccccagtgacaccacaggacacccccaaaggcttagaatcggaggcactggcaccattaaaagtgaggatgaaggtgacacccaaaaacagaagaatcccttgaaaatctgtttttttttttaagaaaatcagaccagcagacccctctccagcaaccggacattagactctagggacgccccttgcgtgtaggtaggtgcatggcctgcactgygtgcacgttcacatgctgggttcttcccccaaagggaacctaaagggcagagttggagaacccgtccctatcctgctttcatcgggggatgcagacgttggagttttcctaagaaaacaactcagctcaatcattcatcccacgtcgaagatcagagtccacaggcccccgtcaccccctcggccttcaaccagcttttgggagtcctactctaaaatgtgagcagacagcaaagacaggcagatgcagggaggagccctctgccacgcagagagaggccacrgtgaacaaactgctcaaacagctctgaggacatggaggctcctcggaaggtaacaactgaaaaccatcactagtatctggagacatgagagagaaaagtgcatcaatgagctgaaagcagattgctctgagaaccatcagagaaccaaaatgctttcggaaataagaccatgttaggaaaacctcgaaagactctgcagtgcaggaggaagtgaatgggaggacagaggaaatgctggcgaycaagagcttacaaataccaagcttggtggaaggcgcattacagcattctcttgacttttgcacatgtttaaataaatcgtttatttcccataatataaaagttctaaacaatatgatagcaaaactgaaaacctcaataaaagtgccaaactataaaagtaagtaagaaaaatagataatccaagaggtaataagaattccagaaaaatggaatacaaaggcagatatatcaatcagaatgtgattggagaaacagaactgctactagtgaaatagaataaggagtttattttaggttttggacctcacatgactgtgagagctgggggagctgtgtgaagccctgaatggcagtcaggccagaagttaccatggctcagccacccagggagggttaggtgaacaggtacagacaagagcaaacatggctgaaacccacraggggaccctatgaagacagcccgactctcrgcacaaaccggaacccaagtctatctctcaccgcctccaagtcaatgctgtgggaactccttctccacagacccacaatgcacttggatcaggattccaagaaggtgcaggagaggacctggtggcagccagggggctgtgaggctgtgagctgcccagccaaggtcaacgattgcaagctgccagggcacccagcactgaccttctggacacaaaaataaggttcttgtttcccttctgccttctcaatccttctcaaaatgtctgtggccaattccaacccagaccacatagggaagggaactcagggaagtttctcccctactgaatcaagctggttaggtacaaggtcagcacagccgctcctsttggccatgcactccacaccccttgaaccacacttaactttcagggaaaggtagtaacaaaatcacgctttcatccagtatggcttgtagtaatcacctgtacaaccaatgatggaccaacttgttccccaaaggggttgtaacgtcccctttacatctttcgagatgtttgttctctttctgactgagtcagccctctgataccctaaaacttaaacactgagacagcaggataactaccactgacacatcttayatcatggaagaggagaggaagaaaacgttatgtccgtaactattcctgcctttgtttcagtgaccgttggagctggcattcatgaccgcattctcttgccatccatcgctaaccctctgctctcagcaagtaccctgcagtttatgttccttgcctggtggggtgacccaaacctttattccggaagggtctgagccattygcattcctgcctgtattctagaatattcttccctgccctcattgtttagaagcaacctaatttcccctggatagttggggctaagcattccagccagtacagtgacccccttctttgctggttcaagctcccctgacaggaagtgctcagagtgctaatggggttgactccactgccagcccagtgraccagtcctgtgggggtatgtcctgagatgggagcatcccgccagggagctaagacctcagatcagcagatcctaaagtttcagggacaggaagaacatgtgtcagtagcagagctcagggagaaatcatgggagaagtcattctaattccagcccatgaaccctggttgtggaaaaatagaaccacacactggccaccgagyggagcatttgcaccctgcctcctggggagtaagattcccacccagcaaggcgcttgtgtcttcaaaaggccatttcaccctttcatcaagccagctccttcacagtgcggggggacctggcaatcccagcatattcaggtccccaggcttctatagaaagtcaccacagactaggtggcctaaacaacatgaatttattcccccactgttctgggggccaggagtcttcagtcaagttgttagcagggccatgctcctttcccaggctctagggaggacccttcctgcctcctccagtgccgtgtggctccaggtgctccttggcttgtgcctggccatgacaatctctgcctctgttgccacgtggctgtctcctctgtgttgctcttataaggacacttgtcattgcatttagggcccacatggtaatgcaggatcgtcacattctgagatccttaactgcatgtgtacagttctgttttccacataaggtcacattcaaggttccaggggttaggacatgaacatrtgtttcagatgccatcattcaactcacttcactcagcaaattccatgggtataatccagggagactgtataaaatcagtctcttggatagaagcaatgctgtagagaacaccattctctgtgtccaggggtggtgacttggactgaaatatcaaagctggggaaggcaaatcatgtccagagtgctgtggtctgaatgtccctgaaattcacgtgttgagacataatcatcattgtgatcataggaagaggtgagcttttaggaggtgaataagtcatggcgatggagccctcgtgggtgggatgagggccttatagaagggctcagggatgagttttctctgctgactctcccaccacgtgagggcacagcactcatcctctttgcctttttggcccctcctgacagacaaggctgcaaaaaggccctcaccaggcaccagatgccagtggcttggtcttggacttcccagccatcagagttggaaatacatttctgttcctcattagttacccagtgtgtggcattttgttatagcagcacaaacaaaagaagacacccaccggattagattctgggtttggtttccagaactctcagccttgtggctacaggggtgagggtttctttattattaatctttatctttagagacaggacctcactctgccacccaygctggagtgcagtggcataatcacagctcactgcagcctccaactcctgggctcaaaggatccctctgcctcaggaggacctgtagctgggactacaggcgagtgccaccatacctggctaattattttttgtagaaatgaggtctcactctgttgctcactctggtctgaaactcctggccttgagcaacccttctgctgtggccacccaaagtgctggggtcacaggcgtgagccgtcactcctggctatgtgggtttcttttaaggactcacagacactttctggtcacttacaaggaccttaagctggaaatttggaattctgagaccaccattttctcttcccaatttttccagtgctcacagaagcaagcaagcaaccctagtgtatcaattatttttgcaaacaaaatctgtggccataactgcttgttcacccacacccttgcctcctacaggcacttgactagaggcatttacaaatttgctttgaagaaacagtttggctgtcacatgccatgcgcaaccagtgttccattcaccgttgtcaacaaagtcgttagtacttgaaaatcgaaccagagaagaccagttctcaagaacatggcactcatccaggagcctgtcccaaggctctgctcctccatgcccctttcaggaccagtctcaggtgaggctggagaggcggagctgctctatgggtgcagagcaggggtgggttatgggagtagaccttgcacaactgtgggggctgggggccactgtggtcctgaatgcggtggtcaggagatggctggctgtggactcrgcaggacaagctggtcaggagacggctggctgtggactcagcaggacaaattgagatctggtgcccacagggcaaaggagagcctgtgccttgtcaggccacctccaacctcaagcctgtgtatggctggcaggaagggctgggcccttcggagctgcacactctggtccaggacatgggcattggaaggtctggcaggggctggggaagctgtggtccaggtcatgcccaccccacacccacactgtggagccttcttagctccaaagtgctcagtgcccccatattggtccttytttttttctttggtgctggtggtgtgggtggtatrtatttaattagataatacatgacctttcaaaggaatcaatgcagsctgtatgtaagcaaggaaataaacaaacccaccatcctatttacaaactagaaaattagctgggtacaatggtgcatgcctatcatcctggctactcctttgagcccgggagttcaagaccagcctgggtggtgtagaaagaccctgtctccatttaaaaaaaaaaaaacctagacaattactagtgctctctggtgtgtccccccaacccgcagagatgactactatctttacttttgtgctagttgttttcttcctttttctttttctaaaaattgtggtaaaatagacataacatgaaattcactggtttagccatttgtaagtggacagttccatggcattaagcatacaatgttgtgcagccatcaccaccatcatctccagaacccttccatctgcccaaactgaagctctgtcctcattcagcactgactccccaacccccacccccaccccctggccccaaccatttcactttctgtttctaggaattggactcctctacggaccacctacaatagaatactgcaatatttgcccttctgtgtctagcttattgcacagcataatgtttccaaaatgtattgatttcagggtgtaaagactatggccccagtttcacttcrgcttttgagagttcatgcaaaatgtctttgtggcctgtgctgacccagagccataaggggaaggatttgccaagcagctgaagcttagctatgttaatacatacaaatcyatyaccaaaggaaggaaactattagagcaataactttaaaaaatgtcccaggactgaaggacactagtgtcttatcagaaggggcccaccaaatgccaagtaaaatggataaaattataccctcaagaaaaattggccggatgcggtggctcatgcttgtaatcccagcactttgggagtctgaggcaggagattcttttagctcaggagtcggagaccagcctgaccaacatgatcaaactccgtctctactaaaaatacagaaaattagccaggcgaggcatggtggcacatacctgtaatcccagctacttgggaggctgaggcaggagaattgtttgaaaccgggaggcagargttgcagtgagccaagatcggactccgtctccaaaaaaaaaaaaaaaaaaaaaaagcccagtggcacacacttgtcatcccaactatttggggtggggggaagattgctaatcatgccactgcaccctggcttgggtgagagagtgagaccctgtctcaaaataaataaataatgaaaattacaaacagaaaaataatgatgaaatttcaggacaaaggcaagtccataaaagcttccagagaaagagcaattttcatacaaggctaaggatttcatgtaagggacttcattccatataaagactcaactgcaaagctaggctctagaaaaacatggagcagggtcttcaaaatcctgaagacaagtatttccaacctggaatttcataccagttaaggtgaaggtgtagagacgctttcagaggtgtgaggtctagaaaccttttcctgtcatgagcccttctcaggaaactgctaggggagaaaacaagggagtagactgccaagagggaaaaggtttcaggaccaggaagaaggtcagcaggagagcagccactgcatckccatatggcggttgggccggggtccccaggaccacctcaggcttgatggttcacgagaaggactcccaggactcagcacatgatctaactcccgcccacccactagagcgaccgagtgtccggcacagccggtcaagggaaaaggtgtgtgaggtgaggtcagaagaaggcaggcaccgtctccagcaccctctcccactggacccactggactcactggacctgcgaattctctcagcaaagagcggcaacacgtgtgaagtgttgtccaccagggcagctccttagaccccccagggcttctgctgggggtctcacacaggcaccctcttcttggcgtgcaccaagattccagaattcgagaaggaatgcaggtgttcaggaaaaacgcctcgggcatggagaggcactgtcaggttgctgggagccctcctgaaatccgagtccccagaggccagcccagggtcagcctggtaagcagaccctatakaggatggcagtcaggcctgcttgttaactcttttctgcatcatcctttgaagggagaagtcaaaaagagcrgctgatcaagagttagcccaacagacctcaggtgccgaggggagcagctgcagccgwccctgcgtccagatgagagagagccaggggtaaattgccgggtaggcagactatttggcctcttttacttcaatagtgagaggcagccatctcctcctccaaatcacagcaatggaagaacccagcaacaccaaagatggctcctctgctgtaggctggagctgggcccgttaactatcaaggttttccttttgctttcatctggaagatctggaaggcacatatgtttttttttttycctttccaatttttattttaggttcgggggtacatgggcaggtttgttatgtgggtaaattgtgtgttgcaggggcttggtgtacggactatttcatcacccaggtaagcagcacrgtatgggatcctcatcttcatcccacccccaccctcaggtaggccccagggtctactgtctcctccgtgtgtccatgtgtactcagtgtttgccttccagttataagtgagaacacgcggtgtttcgttttctcttctcgcattagttcacttagaataatgacctccagcttcacccacgtgtctacaaaagacatggcttcattctttattatggctgtgtagtattccatggtgtatatggaccacattttccttatccaatttaccactgatgggcatttaggttcctttcatgtgtttgctattgccacatatgctttaatattgactctctctttacatatttatgtaatgtatgtataaaatatagtaaaatctcattttatataactctcttaatggaaatgcaatttttacaaaataaattcttatttccatttttccaaaataaactattttacatatctcaacataaaattatcatatggtagtacttgktattacaccttctctttggaattttcaagataatttttgcattactattaaaaacatcctgcatgatatcttctgggcttccactaagaatttggaagtaattatcttcatctacctgaagtggtagagacataaatgaaactttaacaacagaatatacttcctttaggagctgtatgaagagattttccrtttctgtcattgttgagactgtggttgtgccaagaaagaaattcttaagcattaagtttaaggaggtgagaccttgtcagccacacrgtgggcaatacagaagagcctcatccatcccaaccccaaccaaccatagccagaccccaaagagtgagattttagtccagtttatttattctttaccaayctttgaaacttccatgacaagctattaattacgtttttttctcttgtgacagtaatttaaacatctgtggttcattacaaagcagtaattgagggaatgtttaaaggaaactatgagccactaaatacattcatctaaatgcatttcacctgatgccaaacaacagcaagcccctctcaagttcccaggctttgtggggtatgaccaaagctcctcgtgcagtctacgtgccatgtgtgcatgcacacacacgtatttgcccctgacttaagtttttctttctggaaatcagaagctaggatatattacgagacaaaaatattttggtttttaattattaacttgctataattaatatgaaagcattgtgtggtaaattgaataaaaatctcagtattgtggctgcattttcctccttttattactgatcaargcatcatcaaccttgaaggggcacttaatcgtcctcttctgaagacacatctatgcagtgggtgaaatatgatgttggacatcctgtgttttggtctatgctggaatgttctgaattcagatatatggtagacaggagtaggagtaaagttgatttttgttcactaactccacatcttccatcccctgactactgcgagagagaatgcatttctctccagggagaatcccatgagagcaaagtgaggaaagcatcggyaggaaataacgaacgctgaaatcagccttttacaaatgtatttaaagacagctcttacaaggttcctctttcatggtagtgtttgatttttaagtgtgcattacaagagcagtctctcaacttttttgcacattgacccctaaaataattttgggaaagtatgtatcccttcacacattatatgtggacaactaaacattttcgttataggtatagttatcaatcatgtatttttggcmtatcataaagtattgacatttaaaaataaaacatcgtcttttcaaacrtgttaaatgacattgaaattccacaataatgtgatacttgctcttatccataaagaatacttaaaaagctcctctttaacatgtgaaaacttatgtctttttgctaaaatataattttcttttctttttttattttttgagacaggatctccctctgtcacccaggctggggtacagaggtgtgatcttgcctcagtgtaacctcaacctcctgggcccaggtgatcctcccacctcagcctcctgagtagctgggaccacaggccygtgccaccaagcccagctaattttttgtatgtttgcagagacagggtttcactatgctgcccaggctggtytcagattcctgagcccaagcaacctgcctgtctcggtctcccaaagtgctgggattacaggcatgaaccactgtgcttggcctaaagtataattttcaaagaggtaaaattacaatgctcatgcaagattttattcaacttattaatcaatgaaggaagatataatgagtaagatgtagaactggttcaaagagtattttaggacctagagatattgagrcaattttctaaaggaatattaagataagattgtttggttagaaacaaaactggttgatctcctaaaggacaataagctatatcctttgaagtatattttcctatttgttttaaaatgtaggttttattattgtttagatatagtgaggccaacagatcaggagatgacggccacagaaaacacagtttgttagagctcccacaggaaggggccacaccatgccacgccacacagggttggggcacagagggaaagaggcaagacaagagcctttgtagtggcttccaagggaaggccgggcaaggcggggagaacaggctgggcaggtttggccttggctgatgtgatcagcaggccctggcatgaaggactgtcctccctgtctctggcctcactctatggtaagcagggcaagggcacagtggcctggaatgcaagagcttatccaaccaatcgaggtggctggcgggattggyggcttgcatgtgaaacgtgtgcttgcaggtgagtcatctgctatctctaagaatggatgagccgtaggcaggacgggctctccccttttagccagagcatcaagaatatagaaaataaaatgtagttaatacgcatcaaagcagaaactatttgtacctctattggcaaacatcttcaagttaacatgcaattttgccaactcaaagactttcatcaactagtaagcagtgagttgaacaaagtacgttcccctcatctttgggtgggactgtccctttgtatgacattaaatgacattcatttctcctttttgccttactttcgcattctagccatcagtatcatcttcccaaaactcaggtggcaacttgaggttagaggttaagggtatggcctttggcacctgggttgaagcctgactctgcagctgtgagcactgtgacctcgggcagattgcctaacycctctgtgctccaggctcctcatctggggaaaggtgaaggatactcacagagcttacctcacagggaggctactataatcaatggttgcatggcgtatatttttctatgcttttactttcaacttttctgggtctttctatttaatgtgagatctctgagacgtcaagcatatagttgtttttttttttcttttctctttttgtttttgtttcaattagagacggagttttgccatgttgcccaggctggtctcaaactcccagcctctagccatctgcccgcctcagcctccccaagtgttgggattacaggtgtaagccaccgcacccrgttgggttttatttttaatgcaatctgacaatctgactttttattgaggtatttagtctgtttacatttaatatacataaactgaccttcgggtttgtctctaccatcttctttgyttcctgcttattccatctgttcttttttctttaaacttctttcacrgcttccttgaagtaataaagtatttttattattcctcttcctccctccattaacttgtcagttaaacattctgttgttattcttttcatgattgcgctagggtggcattgaccaatggagccttctgccgtgagacagccattctgtgcctgtctttccctcttacaccacccactctttcctgtagaatarggatgtgcaaacgttctctctaaaggaccagatggtaaatattttaggctttacaggttatatggtctcggtagcatcttcttaactctaccatcatagcttgagagcagccataggtaataagtcaacagattagcgtgattgtgtttcaaaagcacttaatttacaaagcgggtggcaggtggcttttgcccgccagctggcctgcatctactccatagcctcatgctctttgaggtagccttgctcccagggctccaactcaggatggattctattcagggtcaacaattttcctcatctaatctctttggtctaggggtgaaaccagttttccactattgcttctcccagttaattcatcaaaaatatttggctttcttatttccatccctacctctgcaaacagctcctgaaactctcttcagttgaacgctttaagtatgtcatctttttcctatcaagatacccactgggggaggggtgtggtggctcacgcctgtaatcccaaaactatgggaggccgaggcaggtggatcacttgaggtcaggagttcgagaccagcctggccgtcatggcgaaatcctgtctctactaaaaatacaaaaattagccgggcatggtggcgggcacctgtaatcccagctamttatgaggctgaggcaggagaatcgcttgaacccaggaggcagaggttgcagtgagccaagattgcgccactgcactccagcctgaatgacagagtgagactctgtctcaaaaaaaaaaaaaaaaaaagacacccactggtgtaacttcatacttatggacttatggcaagtatttcattgtgtcctaagtaaaaacaagctgtttccctatatgtctccctctcctactaaacttcctagagggcagacactatgccttagttatactgatattctccataaaccctattgttaacttttgcatgtaattgaaactgaataagcaattcagaaatggagccaggagaggttagaattaggaaaaaagaaataaatattatttacctaagtgggtaggtgatgaaagaggagttttcaagagagacggagtaggtaaaggaagagagctagttgatttagtctgaaccttaagggaggaaaaaatttacaaggagatggtgtgaaaactgcctgttgttgaatgttatggtttggctgtgttcccacccaaatctcatcttgaattgtagctcccataattcccatgtgttgtgggagggacccagtgggagataactgaatcatgggggctgtttcccccatactgtccttatggtagcgaataagtctcatgaaatctcatggttttataaggagaaaccccttttgcttggttctcattctctctcttgccttctgccatgattgtgagatctccccagccatgtggaaccgtgagtccattaaattgagtgagggtgaggagatggtgttatcagtgtgagttattaactgtgagggtgaggagaggatatgaacagtgtcagtgattagtgagggtgaggagatgctgttatcactgttagttgttgagtgacggtgaggagacggtgttgtcactgtcaattactgagtgttaggagatggtgttttcactgtcagtagttgagtgagggtgaggagatggtgttgtcactgtcagtagctgactgagggtgaggagatgctgttgtcatagtcaggtggtgagtgagagtgaggagatggtctcactgtcaggtgttgagtgagggtgtagatgatgatgtcactgtcagttgttgagtgaggctgaggagatagtgttgtcactgtcagttcttgagtgagggtgaggggatgctgttgtcactgtcaggtgttgagtgagggtgaggagatgctgttgtcactgtcaggtgttgactaagggtgaggagatggtgtcactgtcagttgttgagtgagggtgaggagatggtgttgtcactgtcagtagttgagtgagggtgaggagatggtgttgtcactgtcagtagttgagtgagggtgaggagatgctgttgtcacagtcaggtgttgagtgagggtgaggagatggtatcactgtcaggtgttgagtgagggtgtagatgatgttgtcactgtcagttgagtgaggctgaggagatggtgttgtcactgtcagttcttgagtgagggtgaggagatgctgttgtcactgtcaggtgttgagtgagggtgaggagatgctgttgttactgtcaggtgttgagtgagggtgaggagatggtgtcactgtcagttgttgaatgagggtgaggagatggtgttgtcactgtcagtagctgagtgagggtcaggagatggtgttgtcactgtcagtagttgagtgaggctgaggagatggtgatgtcactgtcagttcttgagtgagggtgaggagatggtggtgtcactgtcaggtgttgagtgagggtgaggagatggtgttgtcactgtcagtagttgagtgagggtgaggagatggtgttgccactgtcagttcttgagagagggtgaggagatattgttgtcactgtcaggtgttgagtgagggtatagatgatgttgtcactgtcagctgttgagtgaggctgaggagatggtgttgtcactgtcagttcttgaatgaggctgaggagatgctgttgtcactgtcaggtgttgagtgagggtgaggagatgctgttgtcactgtcaggtgttgagtgagggtgaggagatgttgtcactgtcagttcttgaatgaggctgagatgctgttgtcactttcaggtgttgagtgagggtaaggagatgctgttgtcactgtcaggtgttgagtgagggtgaggagatggtgtcactgtcagttgttgagtgagggtaaggagacaggagacggtgttgtcactgtcagtagttgagtgagggtcaggagatggtgttgtcactgtcagttgttgagtgagggtacactgtcagttgttgactgaggctgaggagatgctgttgtcactctcaggtgttgagtgagggtgaggagatggtgttgtcactatcagtagttgactgacagtgaggagatgctgttgtcactgttggaagttgagtgagggtgaggagaaggtgttatcactgtcaggtgttgagtgagagagaggagatggtctgtcactgtcagatgttgagtgagggtcaggagatgatggtgttactgtcagtagttgagtgagggtcaggagatggtgttgttgctgtcagttattgagtgagggtgagaagacggtgttgtccctgtcagtagttgagggtcaggagaaggtgttgtcattgtcagttgttgagtgagggtgaagaaatgttgttgtcactttcagttgctgagtgagggtcagaagatgttgtcactgtcaggtgttgactgagggtcagatggtgttgtcactgtcagtagttgagtgagggtgagaagatgctgttgtcactgtcagtagttgagtgagggtgaggagacggcgttatcactgtcaggtactgagtgagggtgaggagatggtgttacagtgccagtgctgtgagaatgagatggtgttatcaatatcagttgttgaatgtgggtgagagatggtgtgaacagtgtcagcggctgagagtgaggtagagaaataatgggtgaggccattgtcaattaggaggccattggcgtcttttgaaagtagttagtgtctgtggagtggcatgtattcaggttacatgaaaagcagctgagaagcaaactggcaatcagagtggcagcaacaaattaagaatattcatattcataaagaccattttttataatgaaaaagtaatacatgcagatgggggaagatcacctgaaccttgagaggtggaagatgtagtgagccgtgatcaaaacattacactccagcctgggtracagagaccccatctccaaaaaacagaaaagaaaagcatttataagttcatgttgaacagtgtttcaaacacatagacaaaatttatatgtcatgaaaatggaatatcagaaaaacattgtttaaaaaaacacaaagtgagtaaaccattaatacgtgaggtgagcggtgcatcagcttgccggcttccagctgcagcgggtgatggaggtggaagggagctgtcctcgggacaggaaatgaaacaaacccaaccaaagccgtgtattcgtttattcaatatsgttttgctttcttgtgtagactgagggtgtaaacctcgtttcygacagtcgcctataggacttttcagcaggctgtgggcctagaggtgggggatgtggaatcaagctaaagacccagaaccagagaaagaaggaagcagcagtgaggaagcaggacaagaacatctcggaaattcagcccggcgcggtgggcgcgcctgcagtcgcggcgctttgggggcccgggccacgtagcacgaccctgcctgtgaacgcacagacaccagcggttccaagggcgcgggcaggaagcgggcaccgaaggcaggctggagaagcgcggggcggaagcaagaagccgcgcggcgaggagggcgcgtggggccccacacagccatggggcgcgcgtactactggcagcgcaggctctggaccgctaaggaggccgcgcgcgcccacgcgtgtccccggcagagcttccaggagacggctgcgaggcccttccacccgcggaccagagcgcgccgggtcgaaccacgacccacgtgcaggccctcgcgcgctaccggaaggccagcctgtggcgcacgcgcgccccgccccgccgatcggtgacgtaatcgggcccgtcacgaggcgggggcggggcctcggaacgcgacgccccccgtcccagctttagccactcgtgacgtcattgcccggactccactgcctcccgcgccgcgcttttgccaccctgggcacgtcatcgtgcgccgacgccaaacgagggcggggcctagggacgccacaccttccgcgccgccgctcgttacgtcatcggacctcgccgcttggcggaggcggggaaggcccgcaggcggcgcctcagccggggttggcgctgaggggagagggcggggaaaaggtggcgaattgaggggaaagtgggaggggcgggaaaggggcggtcggaacatggcggaccagatcccgctttacccggtgcgtagcgcagcggcggccgcagccaaccgcaaacgcgcggcctactacagcgccgcggggcccaggccgggagccgaccggcacrgcaggtaaccgaggcggcactggccccgttccccgccgacgctccccggggcccccagcccaccgcaggaacccggagccgggcgggtctggggtcgctaccggcgcgccccatctgttcgctgggagccgggagtccttggcgttctgagcgcgccgcagctgtggcgtccgccggtggtgagggccgcgggcagctgccggggcgagcggctgcatccccgggacgcctgggccgagcgtaggagccagaacgggagcagagaaccgcggtccagtgttgaggggtggctgctctcctaaagtaaacggggatcaaaagtgctaacttctcggatacttcaaagtctccgaaacttgttcttgtagccctgtgaattgtgaaggtgacggatgtaacttttaattgctttgttaaaaacacactycttattgaaatgacttctcttcgacatttcgatatctttgctaggcacactttttgtttaaacatatatatacaaagtgctttttgtcgacaagtaattttgcttttacgaaagggaaatggggtattgagaacggttaacttgtttagtgggstcacaggttagcagtagaattagtgtacagacctttcatactcgagattgcatttagctcatatttaacatttctcattcaaagaaaagaaaattttaaaaagtgttgcttcttatagtttttgaagttttattccagaggaattgtcgaaaacataatttcactcaatatgtagttgcttcagaatttgagtttttgaataatttttgttttcggccatttgagagactaacatatagctcaaagtacatactggaatgttataacgctgatttgagtgtttacccactagcgatttactctcgggtaacttatttaaactcaagccatggtttcctcatctgtaaaatkctggataatattttttcttacgggattattggagattacagtagaacatgtgtaaggtgcccttttttcagtgcttggttggaagtgggttctggtgttacctataacagtaattgtgttagtaaatctgtttaattttaggagttctttagttggaaatgtgccacctgtttcaaaataggtttccatcacagattgaatccatttttgcctcatgtactttgaagcactgtcatgtggtgcacgcacattcaagattttttgtcatctcggtggattgttcctttcattgttaatgttcctctgtctctggtaattttctttgctctaaaatctttattagatattgatgtcrccatttatgcttttttttggattaatgtttgcatggtattagctttcaacttacctatgttgaatttgaagtgagtttcttgttggatcttatattttttatcaactatgccattctcttttgattggcatatttacaccatttacatttacgataattactgatatgttagaatataagtgtgccatttattatctgtgttctgtttcttctgattctcattctgattcctgtttcttttttttttttttttttgccactttttgggttacttggacacttttttggtatccctatagtgtgtttgagattaggtgttggtatagtttttacagtgcttgctctgggtattacaatatacaaatgtgacttatcaccatggtgtattgctgtatttcaccacttccagtcaagtgtggaaacccttctttcacttaggtcctcactttaagtatcatgtcctgggtatcagatggtgttacagtttttgtgtcagtcatcaaatatggtttataaaactcatgatgataaagatagtgtattgcatataccacatacgcatatttcccctttttctattgttcttccttttttttttttttgagacagggtctcactctgttctcctggctggagttagtgatgcgatcgtagctcattacagctttgatctgttgggcccaggcaatccacccatgtagctgggactataggcacataccaccatgcctggctaattaaaaaaaattttttttgaagagacagcatcttgctatattgcccaactggtctcaagtgatcctcctgtgtcatcctcccagagtgttaggattaaggcgtgagccatggctgctagcctgccattcttttcttagcacttgaaaaatcttgtgctgcttccttcttgtgtccatggtttctgattaggatgctgctgtcactcagattgatgttccccygtagataatgtgtcatttctctctggctgctttcaagtttttactttgtctttagttttcagaagtttaattatgatgtgtcttatcatggatttctttggatttcatgtttggttttgttttttttttttttttkgttttcgaataaatttagggagtttttagccattatttcttcaactactctttgttgttgttgaaataatggagagttgctcccactctcttctctccatttggatttccagtgttaagaaagttggatcttatgttggtgtttcataattyccttaggctctttccctgtttcttttctctgtgttgttcagattgtgtaaattctattaatctcttctcaagttccctaattctttttttttttaatttttttcagtatttattgatcattcttgggtgtttctcggagagggggatttggcagggtcataggacaatagtggagagaaggtcagcagataaacatgtgaacaaaggtctctggttttcctaggcagaggaccctgcggccttccgcagtgtttgtgtccctgggtacttgagattagggagtggtgatgactcttaacgagcatgctgccttcaagcatctgtttaacaaagcacatcttgcaccgcccttaatccatttaacctggagttgacacagcacatgtttcagagagcacggggttgggggtaaggttatagattaacggcatcccaaggcagaagaatttttcttagtacagaacaaaatggagtctcctatgtctacttctttctacacagacacagtaacaatctgatctctctttcttttcccgacatttcccccttttctgttcgacaaaaccgccatcgtcatcatggcccgttctcagtgagctgttgggtacccctctgagacaaggcggctgccgggtgggggcgccccccnnnnnnnnnnnnnnnnnnnnnnnnnnnnnnnnnncccccacctcccagacggggcggctgggcggagatgcttctcacctcccagatggggtggctgccgggcagaggggctcctcacctctcagatggggcggccgggcagaggcgctcctcagttcccagacagggtggcggctgggtagagatgctcctcacctcccagacagggcggccgggcagaggcgctcgtcacatcccagacgatgggcggccgggcagagacgctcctcacttcctagacgggatgacggccaggaagaggcgctcctcacttcccagactgggcggcggggcasaggagctcctcccatcccagatgatgggccgccaggcggagacgctcctcacttcctagatggggtggcrgccgggaagaggcgcttctcacttcccagactgggmggccgggcagacgggctcctcacatcccagacaatgggtggccaggcagagacgctcctcacttcctagatggggtggcagctgggcagaggctgcaatctcagcactttgggaggccaaggcaggcrgctgggaagtggaggttgtagcgagccgagatcaccccactgcactccagcctgggcaacattgagcactgagtgagcgagactccgtctgcaatcccagcaccccgggaggccgaggcgggcagaccactcgaagtcaggagccggagaccagcctggccaacacggagaaaccccgtctccaccaaaaaatacaaaaaccagtcaggcgtggcrgcgcgcgcctgcaatcccaggcactcggcaggctgaggcaggagaatcaggcagggaggttgcagtgagccaagattgcggcagtacagtccagcctcggcaacagagggagaccgtggaaagcgggagacggagacgagggaggggggagaccgtggaaagcgggagacggagacgacggagagggagaagggagagggtaattccctaattctttactctgttatctccactctattctcaatctcatccagtgaggttttatttctgttattgtatttctcagttttataatttatgtttgtttcaagataatatttgattgtggaagcatttttatgtctgctgctttaaaatgcttgtcatataattaatgccagtatctgagttagctcagtgtcggtgtcatgtgattgccttttctaattcagattgcgaatgttctggctcttggtttgacagatggttttcgattgtctcttgggtattttgtatattaggagaatttgggttctatttatatcttttattttrgcgtgcagccaccctgtttagattcagcacataggtcctgggctacatttgtgggctgtggttctaaatgacattttaattctcagagcctttgtgctgtgatctttggtctgcttggtttatgtggtatcactggggctcttcctggtctctgttggtgctgcgtgagagggaaaggtggattttcctaggcctggcrtctcttactaaaagatggaagtgtcagacccatggggatgaagaggcttctttggctgggccctggctgtggctgtatcccatccatatggacccagtggctgccctggtgtgtctgggttggagaagaggagtcttagcaccaccatggtaaaagggttcctgtgrcagaatccctattgctggtgccacctcgatgctctgatgtcttggagcaaggtcttaggttatggataaaaaggttttctggactgggccccttatgtggtggggttgcacctgtcggtgctgcctggctctccctaatgagagagaccagtctcgggcatgaggggcacagagccttactgggccagcagcttgtagtggcaagttccccttactgctactgcccagatgccccggtatcccctgatgggagaggggagcctcaggccccagtatcccttggtggragaggggagtctcaggaagtcactgctgccttcttaccttcttccagaactytcctttgattggctcttgcttaattactaggatttatagttggacttaactggggaggagcagagaaatgggtctgtggcattttgtctggaccagaagttgtgcttctacattattttctgaagttgggttttattttatcgtggtaacatacacatagtttataaagttaagtggtgcttttacaaggcttgcagtaagatattgtgactcaacctgtatgttggtaactattctctggcttttgaaaataacatttattttgctgttaaatgttgattattaccttttagttaatggtgctgttgagttcatcttcccttgtgactttgtttattctttttagagtttttttttttttgagacggagtctcactctgtcccccaggctggagtgcattggtgcagtcttggctcactgcaagctctgcctcccaggttcacgccattctcctgcctcagcctctcaagtagctgggactacaggcgctcactacagcctcgaccttctgggctcaagccatcctcctgctttagcctccagagtagctgggatagtaggcacatgccaacatgcccaactaattttttaatttttttttgtagagatggggttgcactggacttgaactcctgggctcagtgatcgccttctgtcggccttccaaagtgctgggattacaagcatgagccagtgcaccctgcctctttttagagttttatcaattgttgtttcacatattttgcaggtctgttgtttggtgcatacacatttgagattcctgtgtgttctagatgcattgacacttttatcattatgtagttcacccatgtgtctctggtaatttttctgctctgaaatcttcatctgacactaatatagctacctctgctttccttcaattaatgtttgcatggtatataattttccatcctttctctctcaagtcacttatatttgaagtgattttctggtagttgtcatacggttggttctttttttttacccaccgccattgtctgtctttggattgatatatttagaaggtttatgttcagcgtaatgtttatgccattttattttttgctttctgtttttgtttctcggttttctttttcctgccttacggattatgcttcaacattttttagaattccagtttgatttatctatagcgttcttcagtgtatttctttgtgtagatattacttagtgctagctctaggaattacattacatatacataactcattgcagtgtactgttgttggtattttaacggttgttgggtaaagtgtaagagctttacctctttaaatccctttattctcccattggtaatataatactcatgtaaaagtgtatgtagattttacatatgtaaaagtatataaatatttcccttatatacaattagaaccctatatcagacagtgttaacaatttttgctttctctcaatctagaatattcaagaggcaaaggaaagcctattatattcatctaccctttctgccctttctgttttcttatttcctgatagtccacaatttcttatttttgttctgtttcagtaattctctaactattcttttagggtaagtctactggaaacaaattctctttgttttccttcatctgaagatgcctgtatttctccttcattcctgaaggataatttcaccagatacggaattcggagttgacagttcttttctttcagaacttgaaaagtgttatgccacttctttctggtctccgtgctttctgatgagaaatctgatatcatttgagttgtttttccttttgagataggtgtcacttttctcttactactttcaagcattttttttaagtctttagtttttagtcgtttgactgttctgggtcttggtatggatttcttcaggattaccctgtttagggtttgcttagtatcctaattctataagtttgtrtcttttgtcaaatctgagaagtttgcagccattctttgagtgctttttgagctctactctccgtcycttcttttaccctggtgacaccttgtgaaatcttttcttgtaccatagggtcctgagtttctgctcattttttctaagtccatttcctgttcatattgggcagtttctgttrttttstcttaaagttcactgattttttcttcctcgtttttttagttttactgttgagcccatccattaagatttttagtttcaaaatttccagttgattcttcctcatactagcagtgtctcttctgagactttatattttttcatttgtttcaagtctgttcataattgtccattgagacatttttatgatgtgtgtttaaaaatcctcattagataatttcagtatctgtgttgttttgatgttgacatctattgattctcttttctcatttgagttgaaatttttctggttttggggataatgagtgattttccagtatagcctagacattttgggtattatgttatgagatttgggaccttatttaaatcttctgcttatcgggcctggtggtggtgggagtggaatgtgggggttactgccagaaggggctgaagagccagattcccttcacagccccctttgacatctgggaagggaaggtaccatgtgactgctggctccccagtggtctctgctaacaataccttggctgggaaggggaggagtgcctggttactgcatgcctgtggcctccactgacattgcatgggtggtgttaccttttagaaggtggttagattttccacttttcactaggcctcctctgacattatagagatgggcaggaatgctttattactgctatttggggatgttaaatacaatgtaccagaggccattatttcagactaagctcctgcaccaggcaaagcagaccagaacaaaccagaatggagtcacttgtgctaggtgccacaatcaaactaaattaaaaacagaccagtttcctcaaaaacaagaggttcacagcaaccaatcataagggggccaaactgagccagcatragagagtcctctctactttaccctgtaaggaaagtaactttgaaatgcccaatctgtattttgttcctcgtatctgctttctgcagccctctctggctgtaaagtttacctctgctgctcagcatatctgagtatctttctatttcatagatgaaatactgcctgatttgctaataaaagccggttcgatctttaaactaaattttttgaaactttaacaggaacgagcatccggcacccttgtgcatgtaccctacaatgactgccaggcttggatggatgtccccactcctgacttggtctgccctgacaccacctgggcaatggggagagtgtcttcctacggctggggcgtgtgggagtccaggcttcacgcactctttgctgttcaatgtaggtgaggctatttgctttttctgtcgtctttggatgggatatagcaattactatcaaaaatttttcgttccactaggctgcccttttcctrgtcctttggctggagagaccagacttttcttggggacttttttggtctgtgtctattacttttctggttgctaactctctagtacacaacatgggcatgagaccaaaaggaaatactggaaactcactgttgtcttgttctctgggtccaaggaccttactggtctgccctcttctctccacattttgatgtataatgtccagggtttttatctgtttagtgggaagaacagggagtagcacatctactccatcttggtctagaactggaaggaaggagcagtttacattttttcttttttcttctttttatttactcttttttattttaaaattgcttcatttactcatttttaacagcttttttgatatagtttacatacatacaagttaccccacttaaagtgtatagttcagttttttttttttttatgctttaagttctgggatacttgtgcagaatgtgcaggtttgttgcataggtatacacatgctgtggtggtttgctgcacctatcaacccatcatctacattaggtatttctcctaatgttatccttcacctagccccccacaccccgacaggccccggtgtgtgttgttcccctccctgtgtccatgtgttctcattgttcaactcccatttatgagtgagaacatgcagtgtttggttttctgttcttgtgttagtttgctgagaatgacggtttccagcttcgtccatgtccacgcaaaggacatgaactcatccttttttatggctgcatagtattccatggtgtatttgtgccacattttctttatccagtctgtcattgatgggcatttgggttggttccaagtctttgctattgtgagtagtgctgcagtaaacatacatgtgcatgtgtctttatagtagaatgatttataatcctttgggtatatacccagtaatgggattgctgggtcagagggtatttctggttctagatccttgaggaattgctacactgtcttccacaatggttgaactaacttacactcccaccaacagtataaaagtgttcctgtttctccatgtcctctccagcatctgttgtttcctgactttttagtgattaccattctaactggcgtgagatggtatctcattgtggttttgatttgcatttctctgatgagcttttcttcatatgtttgtcggccgcataaatgtcttcatttgaaaagtgtctgttcatatcctttgcttgctttttgatgggattcgtttgtttttttcttgtaaatttaagttcctcgtagattctgcatattagccctttgtcagatggatagattgcaaaaattttctcccattctataggttgcctgttcactctgatggtagtttcttttgctgagcagaagctctttagtttaattagatcccatttgtcaattttggcttttgttgtcatggcttttggtgttttaatcatgaagtctttgcccatgcctgtgtcctgaatggtattgcctaggttttcttctagggtttttatagttttaggtcttacgtttacgtctttaagccaccttgagttaattttcgtataagttgtaaggaaggggtccagtttcagttttctgcatatggctagccagttttcccaacaccatttattaaatagggaatcctttccccattgcttgtttttgtcaggtttgttaaagatcagatggttttcgatgtgtggcgttatttctgaggcctcttttctgttacattggtctataactctgttttggtaccagtactatactgttactgtagccttgtagtatagtttgaagtcagatagcatgatgcctccaggtttgttctttttgcttaggattgtcttggctatgtgggctcttttttggttccatatgaaatttaaagtagtttttttctaattctttgaagaaagtcagtggtagcttgatgggcatagcattgaatctgtaaattactttgggcagtatggtcattttcacaatattgattcttcctatccatgagcatggaatgtttttccatttgtttgtgtcctctcttatttccttgagcagtggtttgtagttctccttgaagaagtccttcacatcccttataagttgtattcctagttattttattctctttgtagcagttgtgaatggaaattcactcatgatttggctctttgtctattggtgtataggaatgcctgtgatttttgcacattgattttgtatcctgagactttgctaagttgcttatcagcttaaggagattttgggttttgtaagtatacaatcatgtcatccacaaacagagacaatttgacttcctctttccctatttgaataccctttatttctttcttttgcctgattgccctgtccaggacttccaatactatgttgaataggagtggtgagagagggcatccttgtcttgtgctggttttcaaagggaatgcttccagcttttgcccactcagtatgatattggctgtgggtttgtcataaatagctcttattattttgagatacattccatcaatacctactttattgagagttttcagcatgaaggggttttgaattttatcaaaggccttttctgcatctattgagataatcgtggtttttgtcattggttctgtttatgtgatggattacgtttattgatttgcatatgttgaactagccttgcatcccagggatgaagctgacttgatcatggtggataagctttttgatgtgctgctggattcggtttgccagtattttattgaggattttcacattgatgttcatcagggatattggcctgaaattttctttttttgttgtgtctctgccaggttttgttatcaggatgatgctggcctcataaaatgagttagggaggagtccctctttttctgttgtttggaatagtttcagaaggaatgataccagctcctctttgtacttctggtagaatttggctgtgaatccatctggtcgtgggctttttttggttggtaggctattaattaccgtctcagtttcagaacttgttattggtctattcagggattcaacttcttcctggtttagtcttgggagggtatatgtgtccaggaatttcttctaggttttctagtttatttgcatagaggtgtttatagtattctctgatggtagtttgtatttctgtgggatcagtggtgatatcacctttatcattttttattgtgtctatttgattcttctctctttacttctttattagtctggctagtggtctatctattcagctaatcttttcaaaaaaccagctcctgggtattcattatatccagccaaactaaactgaaggagatagagacactaaaaacccttcaaacccttttcttcgaagggtttttcgtgtctctatctccttcagtttagtttggctggatatacaattctgggttgaaaattctttaagannnnnnnnnnnnnnnnnnnnggctattaattaccgtctcagtttcagaacttgttattggtctattcagggattcaacttcttcctggtttagtcttgggagggtatatgtgtccaggaatttcttctaggttttctagtttatttgcatagaggtgtttatagtattctctgatggtagtttgtatttctgtgggatcagtggtgatatcacctttatcattttttattgtgtctatttgattcttctctctttacttctttattagtctggctagtggtctatctattcagctaatcttttcaaaaaaccagctcctgggtattcattatatccagccaaactaaactgaaggataggcaaccctaaccttttgaagtgtggatatacaattctgggttgaaaattctttaagaatgttgaatattggacctcactctcttctggcttgtagggtttctgcagagagatctgctgttagtctgatgggcttctctttgtgggtaacccgacctttctctctggctgccctaaacattttttccttcatttcaaccttagtgaatctgacgattatgtgtcttggggttgctgttctcaaggagtatctttgtggtgttctctgtatttcctaaatttgaatgttggcctgtcttgctaggttggggaagttctcccggataatatcctgcagagtgttttccaacttggttccattctccccgtcacattcattcacacaatgaaacataggtttggtcttttcacatagtcccatgtttcttggaggctttgttcattccttttcattcatttttctctaatcttgtcttcacgctttatttcattaaattgatcttcaatctctgatataatttcttccacttgatttggctattgatacttgtgtatgcttcatgaagtycttgtgctgtgtttttcggctccatcaggtaatttatgttcttctctaaactggttattctagttaacaattcctctaaccttttttcaaggttcttagcttccttgcattgggttagaacatgcttctttagctcggaggagtttgttattacccaccttctgaagtctacttttgtcaatttgtcaaactccttctcygtccagttttgttctcttgcaggtgaggagttrtgatcctttggaggagaagaggcgttctggttttaggaattatcagcctttttgtgctggtttttccttatcttcgtggatttatctacctttggtctttgatgctggtgaccttcagatggagtttttgtgtggatgtcctttttgttgatgttgatgcagttcctttgtttgttagttttacttctaacagtcaggcacgtctgttgcaggtctgctggagtttgctggagatccactccagatcctgtttacctgggtttcaccagcggaggttgcagaacagcaaagattgctgcctgtttcttcctctggaagcttcgtcccaaaggggcacctgccagatgccagccggagctctccggtatgaggtgtctgttgacccctgctaggaggtgtctccagtcaggatacatggcggtcagggatccacttgaggaggcagtctgtcccttagcagagctcaagcgctgtgctgggagatacacagctctcttcagaggtggcaggcaggaacatttaagtctgctgaggctgtgcccacaacctacccttcccccaggtgctctgtcacaggaagatgggagttttatctataagcccctgactggggcagctgcctttctttcagagatgcccttcccagagaggaggaatctagagaggcagtctggctacagtggctttgccaaggtgtggtgggctctgcctaggtcagacttcccagcggctttgtttacactgtgaggggaaaaccacctactcaagccacagtaatggcagacgccccttgccccaccaagcttgggcatcccaggttgacttcagactgctgtgctggcagcgagcatttcaagccagtgaatcttagcttgctgggctccgtgggggtgggattcgctgaggtagatcacttggctccctggcttcagccccctttccagaagagtgaacggttctgtcttgttggcattccaggcgccactggggtatgaaaaaagactcctgcagctagctcggtgtctgcccaaacggccacctagctttgtgcttgaaatgcagggccctggtggtgtaggcatcgaaaggaatctcctggtctgcggattgcgaagaccatgggaagtgcgtagtatctgggccaaaatgctctgttcctcacagcacagtccctcagtgcttcccttggctaggggtggggaagtttgcctgaccccttgtgcttcccgggtgaggcgacaccccactttgcttcagcttgccctccttgggctgcacccactgtctaaccagtcccagtgagatgagctgggtacctcagttagaaatgcagaaataactcgccttttgccttgatctcattgggagctgcagaccagagctgttcctattgaccatcttcttcttttttttttttttttgagagggagtctttctctgttgctaggctggagtgcagtggcgccatcttggctcactgcagcctctcctggcttcaagcgactcccctaccttagcctcccaagtagctggcactacaggcacgtgccaccatgcccggctaattttttttgttttartagagacagggtttcaccatgttggccaggatggtcttgatctccggacttcatgatccacccgcctcggcctcccmaattgctgggattacaggcgtgagccactgcgcctggctcagtttttttttttggaatattcatagataaatgtaactcaccaaagtcagtgtttgaacatgttcatcatgtccaaaagaaagtttgtaccccgttgggtaccccgggtatgagtacccctatcattttcctaccaaccctatcccatcattttccattccacctatcccccaaccaccatatctatagagttttttcactgtggtaaaatataggtaacttaaaatttaccattttaactatttataacaagtcactaatttcagaatggcacacatttcccaaaatagaaatattagaacatgacaattttgctataaacttaattcacttcccaatttaaactttgggaagtgtgtgctatataatagagtaaaagtaaaaaaaaaaaaaatgtaagcgtattgtcttaatttacgagaaacagaattttacattatgcagcctagatatccacattggcggttgaaaactaaatagttattagaaaaacagctttcatatgagctttacatcgctttgtgagcattgaaagcttccttccttgaccatttgaaaatgacatttkgctcttatgtataaataattgtacttattgtattttaaaagttctcaggttttccttgamgtggaattatttttatttcattataatcatactactttaggacacagtgtatttaaaagataacgttggttagttgttaaaacttgtataaaaattttcatgactgggcttatattttataaaaatttccaagggaagaattagatgtgatttgagtatgatgttagtccattcttgcattactataaagaaatataatacttgaggctgggtaatttacaaaaaaaaaaaaaggtttaattggctcgtgcttctgtaagcttttaaggaagcatggtgctggcatctgcttctggtgaggcctcaggaagtacacaatcatggtggaaggtattggagagccagcatgtcacatgacgaaagggagcaagagagagaatgggaggtcccagacttttataaacaaccagatctcacgtgaactgagtgagaacacacttatcaatcaccatggggactcatgagaggaccaccccctaccccatgattcagtatctcccactaggccccacctctgacattggggatcacatttcaacatgaaatttgcaggggacacacatccaaaccatagcatatggttaaggaagattaagaaattcaatagcacattgcctttattatcatcgaggatgaagatgttacggttttcatatgtcattaagtaaacaaaatgacgtgtgccacacatagtagctcatagttcactgggaacgcagttacttgttcagtctgttttctacaaagtcatgtgagatactgatttttccttcgcattgttgatatctgggtgaaaataaggtatttgttaaattggtatttcccttttttgtgttttaagtgatagtggtgtcattcaacttatctttgcagttgaatgaagaatgaatgacattgagcattattgttttgtttatccatgtccattattagtttttctttgcttttgccagcagtgtgactattggccctgcccagagccatttgcaatcttacaatagttaagtgttagcactgaaagatactaatgttaagaacagatgtctactgtctgattattgggaaaatattagtgtttcttagtagaagcaacacagttttttttaatactagatttctcattctgagtctatacacaattttctatgaatcataaaactttgataattatgatagtctaatattttactagttgtaaaaatgaaacttattttgctgtgatgtttyrcaattgaaaagccttttttttttttaaggcgtagtactaattcttaagacagtgtttatctaattgtccagtcccaggattcrttggaatcagagacattttcttagggggtctataagaatttcctttaaaaggcatccgtaggctgcgtgcagtggctcacgcctgtaatcccagcactttgggagtccaaggtgggcggatcacctgaggtcaggagtttgagaccagcctggccaaggtggtgaaaccctgtactaaaagtgtaaaaattagctggacgtggtggcgggtgcctgtaatcccagctactcaggaagctgagtcagaagaatcgcttgaacttgggaggcagaggttgcagtgagctgagattgcaccactgcactccagcctgggagacagagcaaggctctatctcaaaaaaaaaaaaaaaaaaaaaaaaaagataaaatctcaagtttaaaaaattatttacacttgccagaatagaaatgttttacttatttttttttttacacctaatagtattagcatgaagacagagttgatagtagggaacatcacaattttaggtaactgaagtatgtatcctgagctaattggctatatagcttcaaatttttgggtttgcatttatataacattggatattgtaccattaactctaattcagaagtttttctcaatttatgtatagcagtgttatttcttatttcaagaaattggtgttcagttttcttgtagaacattttagaaatcattagctccaaggttattgtatatatgattcccatgggggaaatgacatctcagctcaagggactatttccatgttccttttcctgggttttgctactaaagtcaaggcatatttttcaggcagccatccctttaaattttatttattcatttgtctgctgggttatttatttattttaacatcttgccctttgtcttagttcattttgtgctgctgtaacaggatatctgagactagataatttataaagaacagaaatttatttctcacacttcttgaggctgggaagtccaagatcaaggtattgacgtctggtgaggccttcttggtgtgtcctcacatgggagaagatgggagggcaagagaggatgaatgtggtttcctcacatggcagaagagcaggagagagcaaacccattgcaatatgctctctttatgatggcattaatgcatcatgagggcggaactattgtgagctaaatgcttcccattaggcactatcttctaagactgttgcattgaggattaagcttccaacacatgaatttggaggggacaaaaacatttcaaccgtagcaccatttgtctcctttgctgctattggagggagagtcccaatttctcattagtttatgcagcttgctgcttagtaatgacttatcaatgacagttgaaacttgtagttgtatttgatgaaggaaatatgcacatttctttatagcacttagttttttgctttgtttttctactttattaacatgcaggcaaagtgggagtgtttatttttaaagaagctttgagcattagayatgttttaaatctatttcttcgtttaatatcagttgkcttctaagaagtgtttctcatcaaaatggaaacaataaggcttagatatttaagataaaatgtaagttttaagctagttattgtaatgatttacttagtaacttttacttagtaacttatgtgtaacttatgtgccttccagtacttgagagttcctaattttttttgaaacctttggctgcagttcagatagctgtccttgtttcttagcatggcagtgctcttgggtttggtatcatccattctgtcatctttgttcataattgtttttactcattttaaaaatatgtttccagaattatagttaattgctggaaacgttgatttttcttgagtgacaaaccaattaagtgtgtatgacaccaggcaacaaagacacttaagattctgcgcttttcctgtctctgaaaaaaatccattattcatcatcttattgtttttaaatactgaggtaaaattttcartacaataggaaaattgccttggaaatggaataaattgcttgccagttcaaaggctccatttctggagttgaggttacaaaacatgatgttgcttatattccttatctttcagaactcgttgtgctgcgtttcccgcattaaacttgataggattgtgacttttactaaaataagacataactgttgaataacttaatgaaaaagatcaaaagtctcatttagggtattatattacaatatatttatgtggtggtttgaatttattcacattttrtataaatactcattttctagttgactgttttaaaagaagtgatctyatacagagaagaaaaaaatgacattttaagggaaaatattattaatgttttagtctgttacttcatagatcatgtaattttttgcctaaattataatgaaacttgtatgttgtgaggttgttctgtgatgctgtcgatagtggttggagttgtgtataaaagattatctggagacactaaagcaagtaacattttgattggtagagtagggtgtttaaaagaggggtgaaaagaagtgactgccatttctcctaacacatttactttcaacaaaggtcttctttgtgattatttttagtgacaatattctattccatggtatatttcaccaattatttattcatggatactatgctttttgccatgtttcctttggtctttttcaacatcacagcacagtgatggttatctttgtagagaaatcttgaacacattttaaatttccgtgggataatgagaaaccatggttaaagtttatttacgttacagaaataaaaagctttcaatgcatcgtcacaaattgttctccactcttaccagcgattaagagtgcctgtttatccaagaccgttggccatattgaatgttaagaattcttttttacatttgataagcaagacatggtctcttcttgtttgaatttgcatattttaaaagtcctttgtgatggcataagaatgatgcagtggactttggcgatgcagggggaaaggttgggaagggrgtgagggataaaagactacaaattgggttcattgtatactgctcgggagatgggtgcagcacagtctcacaaattaccactaaagaacttatgtaactaaataccacctgttccccaaaaacctatggaaatgaaaaattattaaaaaaaagtcctttgtgaaaacaaaaattattccaggtttaaaaccttccaatagccttccattacacttaaaattaaaccccttcctgttgcttggcctgcactgtgtcccttgttcctgcccatctcttcagctgcttctggtgtcctgctccccttggcccactgtgcacgtgcccagctggctttgtgttgtggctctcttcaaggtctctgtgctagttggccagtctttttaggccttcagagattggttgcttttcctccagatgtcactacttggggcctagcatcttgggtgatctaaggaagacctctccctcacttccagtcttatgaaaaaaaattattgttaattattcgttattatagatacataatgtttatagacatttatgcgatacatatgatgttttgatacatgcatacaatgtgtaatgatggaatcgggtaattgggatatccgtcacctccagcatttatcatttctttgtgttaggaactttgcaattttattcttttagttatttgaaatacacaataagttactctwaattatagttgccttgttgtgctactgaacactggatcttattctttgtatctaactgtatttttatacccattacccatccattctttgtcccccactctccactacccttcccagcctctgataagcatcattctactctctgtctccataagtccaactcttttttaagctcccacatgtgagtgagaacatgtgatatttatctttctgtacttggcttattttacttaaaataatgtcctttygttccattgatgttgatgtaaatgactggatcttattcttttttactgttgaatggtactccattgtgtatatgtaccacattttctttatccattcatctgttgatggacacttagattgcttccaaattttaactgttgtaaacagtgctgcaacaaacataggaatgcaggtatctctttgataacatcgatttcctttatttttggtatataccaagcagtgggattgttggatcatatagtagctcaatttttagttttttaggaactttcaaactgttctccacagtgattgtactaatttacattcccaccaacagtgtacaagggttccsttttgtctacatccttgccagcatttgttactggttgtcctttgggtataagccattttaacttgggtgagatgatctctgtttgtagttgtgatttgcatttctctgatgatcagcgatgtcgaacaccttttcatatgcgtgtttgtgatttgtatgtcttcttttgagaaatgtctattcggatcttttgcccattttttattagattattagaattttccatatagagttgtttgagctccttataaattctgattattaatcccttgtcaaaggggtagttggcaaataggcaaatattttcccccattctgtgggttgtctcttcactttgttgattgtatcatttgttctgcagaaactttttaacttgatgctatctcgtttgtccatgtttgctttagttgcctgtgcttgaggggtattgccgaagaagtctttgtccagaccattgtcctggagatttcccccaataktttcttgtaatagtttcatagtttgaggtcttagatttaagcttttaatgtgttttaatttgatttttgtagacagtgagagataggagtctattttcattcttctgcatatggatatccagttttcccagcaccatttattgaaaagactgtcttttccccagtatatgttcttggcacctttgtcaaaaacaagttcaccatagatgtgtggatttgtttctgggttctctattctggtccattggtctatgtgtctgtttttatgccagtaacttgctgttttggttactatagctctgcagtataatttgaagttaggtaatgtgattcctccagttttgttctttttgcttaggatagctgtaactattctgggtcttttgtagtttcatataaattttcagattrttttttctatttctgtgaagaatgtcattggtatttcgatagggattgcattgaatctgtagattgctttgggtagtatggacattttaacaatattgatttttccaatccatgtacatggaatattttttcattttttggtatccttcaattgccttcatcagtgttttatagttttcatcatagagatctttcacttcttcggtgaagttaattcctaggtatttaattttatgtgtggctattgtaaatgggattacttttaaaatttctttttcacagtgtttactgttggcatatagaaatgctacttatttttgtatgttgattttgtatcctgcaactactgaattgatcagttctaatagttttcttgtgaaatctttaggtttttgcaaatatacgttcgtatcatcagcaaacaaagataatttgattatttcctttccaatttggattccccctatatgtttctcttgtccgatagctctagctaggacttccagtactatgtcgagtaacagtggtgacagtgggctgagagttttgaagtcttcagttgctattgtggatttgtctatttttctttccacttgtatyggttttgctgtatgtgttttgaagctctggtggtaggtgcatacatatttaggacttttagatcttagtggtgatttgatccttttattattgcgttatgtccctctatgctaggcagttctttttttgatgtctttgttttatattaatatagctacttggctttcttttgactagtgtttgcattatatatagtcatgtgttgttgaaggatggggtgtgatgttctgagaaatgttaaataccattaatacttaaaatacttcctctagatactgagttttgcactccagaaatgtgtttggcaatttcattgttgtgcagccatcctagagtgtactcaaacagaccaagatgatagtgactactgcacatctagcctatatggtatagcctattgctcctaggctacaaacttgtgcagcatgttactgtactgaatrcagcaggcagatgtgacacaattgtgtatctgtgtatctaagcatactgaacatagtaaaatacagtataaaacataaaaaatcatacaggacacaaatttacagtgtgtaaattaatctttagcttactggaacttttttactttgtaatttttttaatttttaraaacttattgacttttttgtaataacgcttagtttaaaacatgaagatattgttgcacaaaaatattttctttttttatattctaattctatatgcttttttcttttttaaaaaaatttatttttacttaaacttttttttttttttttttttggktaaaaacggaaacaaaaacacacatattagtctaggcctatacagggtcaggatcatcaatatcactatcttccacctccgcattatgtcactgggaaggcagtaacacacggagctgtcatctcctgtgttaacagtgtcttctgctgggatacctcctgaaggacctgtctgaggctgttttacagttagctttttaaaaaataaatagaaaatgtctgatctaaaataataatgatacagtatagtaaatacrtaaaccaatagcatagtcattagttatgattgtcaggtattaggtactgtacataagtgtatatgctcgacttttatatgaatgactggtagcacaatagatttgatttacaccagcatcaccacaaagatgtgagtaatgcattatactgtgaacgttattatggctgtgatgtcactaggtgttaggaatttttcagyttccttattatgggaccactgttttatatgcaatccattgttgactggtatgtcattatgcagcgattaactgtttatttttccattttttttacttttaatcttttaaagtaaggttgacagagtctcttagttttctttcatctgagaacatctttgttttgccttcattcctgaaggacattgttgctggatgtagacttctgstttcacagttcttttcttttagcacttcaaacatcaagttccactgtgctttggcctccgtttttctccatgagaaatctacaggcatttgaatcgatgttcctctatatgtaatgagttgtgtttctctggctgctttcaagattttttccttcatctttgcttctagtagtttgattatgatgtatctttatgtaggtatctttgacttcatcctgttttaagtttgcttttttaattagtaaattactttcagcaaatttgggaagcttttgtccatttttttcttcacatatttttctgcctcaatcttttctggtattctaataatgacatgcatgttagaccttttcatatataaatatagagaaatagtgtgtatgcatgggtgcgtgtgcacacaccccctcccccatctgcttagaatttctgtctaccctaggatgcttgtagagtatttttaaaaaaagaaaaaaagaacttctgtttttctattcacttcaagactgttcaactttatctcatggagcgtggatataatggctgttttaaaattccaatatgtttttcatactgcaattagcatttgttggttgttctttctcttgactattggccatatttccctgttactttgtatgttgagttaagtttggcttgtatcctggacattttgaatattgtgttgtgggattctgggtctcataatcctttgaagaatgttttaacagtgcattgacctgggtaggtttagacccccagttctgtttcaccaccagtgggtggtggttgcaatgtcagttcagttgcaaagccttggctgtgccatctgctccccgccagtgcttgtcagggcctgttgtgtaggacctgagtaattcccagagcctgtcctgtgcttatttgggtttgggcacatttttgcagctcgggggtgagcctgggacttctgttgattcatatacagaattagrgcatccctcgtccagctttctccactgtctggtttatcccatgtctccaatttccagggttgttttttctcagctttatgctttctgaaagtcagsgttttctctcagagttttagctgttcgtgttgttgtgaaggtccacctgactgggacagttctcagggaaaagttgtgtgaaaagagagaactaccagggacgtccacatcctgtttggactccaggagcccatcttcctgtttcccttgctctcatagaaggtgactacagtgtagccctaatagggctaggagaamcaaaaaggaaaaaagaaaaaaacgttctgctttgcaagagccccctttgctggggctgtggctagaaagggtgggtttcttctggagtttgcattctgcatattgtgggcaatgcagatagagtcttcactttgacaagaactctgcattggatttcaagagcctgttttagatacctggagctaagctgcccttgtcttgaaactgtgtgtgtcagccccatcaactggaggtctgaaaggaggaagaattactaggaatgaaaatatgacaggttgtgatcagaaatatgattccatcgtacacgacatgtacactcggccactgcatacgcgtaccttcatatcacccatgccttttggcctctgggtacttaaaacgtgctgtttctctttgagttttctaggcagtgaggactgaatgactgggttcctgagactccctgtattctcttgaaaaaagaaaagtcttccacaatactgacctatctctaaattgcactttagcagaatgtgctataattgcctgcttatgtgtttgattcctattttttgtttctgaagagctcttaatttccacttattgctcctttccttcccctcaccaacaagcctttcaagaggtgcatccttcttcccatgtggacttctgcccccaacattgatgccttactaaccaagcttgctgccttggctctatgcaccctcctgtaggtcccccagtaaccagtgctgtgatcacagacctattgcccttagactctttctgggtataattttcatccatggtctgccgttgctagggcccccagtcctgttttccccctaagctgcctggctgtgatccagactggactctggacctggctttgttggtttggaatacttacttttctccttatgtgtcaattaaggatggtactatctctgtyccttatttatgttttaatagtgggttttggttagttttagctgtcttctatatggaatttagagaatgttaaaaaagatttcaatataaatgactgcctttatcccagaggaacccacgagtctgctttctcagtttttacattgagacaatgcctccacaaatacttgatgcaaaattcagtaagacagcacttgttgaatcaccattatagtttctgacaaattgttctcaaaaaggtaagtttttattttttaaagataaattacatttgtgattgaggaaggataaaaggaacagttttgatgataggctgcctgtttcttgaaatcaagaggattgttgagctttaaaaggtctgctggttgttgagattttttcattgaatagcgcattttagtgaagagaataacagaataaatgggacatagcatcattccccaaagatataaactgtcagcaaaccaagggatgatgttgatacctttcagatacagacagctacatactgtcgaaagtcacttctagaatgttggttgatgacttaaagttgtgtaacatagagtgtttagatgttgcttggagtgaacattctttgctatastcatgtttcagaagattggttttttctgactggattaagtgcagtgaggagctgttgagcagcattggttgtgctgtcaggctgcccatccgcaccacagatgcctccaggattatgctcacagcacggttaacagagacttcttcagctagcacaggtctcgttgggcagcttttttaccttagctaacttattcctttgcaaaagaaagcagcctctgcagtcttatttataatgctttccctcagctgaagacagcctaatttgaggaaatattgtccctaaatgaaacacactgtaaagaagactgcttggcctatctcagcactccatttttaccctaactaggtaccagctggaggatgagtctgcgcatytggatgaaatgccactaatgatgtctgaagaaggctttgagaatgaggaaagtgattaccacaccttaccacgagccaggataatgcaaaggaaaagaggactggagtggtttgtctgtgatggctggaagttcctctgtaccaggtttgttatccattgctacctaatttccttatatgctaaggttacttataaggttagcttctaatatacttattagctatattaatataaaaactcaaggagatattccttaaatgatatcatggagattatcagtacattaatcaaagccaaacaatgctaatatgaaaggaaaggaaagccaaattattatcttacgagaagttttaatggttaaaagctggaggccgggtgtggtggctcatgcctgtaatcctagcacttcgggaggctaaggcgggcagatcactttgagctcaggagtttgagaccagcctggacaacatggtgaaaccccatttctactaaaaatacaaaaattagctgggcgagattgtgagctcctgtaatcccagctactagggaggctgaggcaggagaatcacttgaacctgggaggtggaggttacagtgagccgagatcgagccactgcactccatcctgggcaatggagtaagactctgtctcaaaaaaaaaaaaaaaagctagagaaaattagygactttatagctaatgcatgatagaattaataatggttgctctatcaacatttataaatggtttttctttttcttcccaaaagatagatatgggcctatactcctctggtatatcttttactcagattcacctatatttttccccacattttgctacatttattttattattatttttatatcattatttttctgagtcatttcagactaggttgattacttcattcctcttcttaattcttcagtgtgtattttctaagaaataggtattttctttttttttaatttttttaattttttatttttttattttttatttgttctttccctcccccctcccccctccccaccacagtccccagagtgtgatattccccttcctgtgtccatgtgatctcattgttcaattcccacctatgagtgagaatatgcggtatttggtttttttgttcttgcgatagtttactgagaatgatggtttcgaatttcatccatgtccctacaaaggacatgaactcatcattttttatggctgcatagtattccatggtgtatatgtgccacrttttcttaatccagtctatcattgttggacatttgggttggttccaagtctttgctattgtgaatagtgccgcaataaacatacgtgtgcatgtgtctttatagcagcatgatttatagtcatttgggtatatacccagtaatgggatggctgggtcaaatggtatttctagttctagatmcctgaggaatcgccacactgacttccacaatggttgaactagtttacagtcccaccaacaaggctacagtaaccaaaacagcatggtacttgtaccaaaacagagatatagatcaatggaacagaacagagccctcagaaataacgccacatacctacaactatctgatctttgacaaacctgagaaaaacaagcaatggggaaaggattccctatttaataaatggtgctgggaaaactggctagccatatgtagaaagctgaaactggatcccttccttatacaaaaatcaattcaagatggattaaagatttaaacgttagacctaaaaccataaaaaccctagaagaaaacctaggcattaccattcaggacataggcgtgggcaaggacttcatgtccaaaacaccaaaagcaatggcaacaaaagccaaaattgacaaatgggatctaattaaactaaagagcttctgcacagcaaaagaaactaccatcagagtgaacaggcaacctacaacatgggagaaaattttcgcaacctactcatctgacaaagggctaatatccagaatctacaatgaactcaaacaaatttacaagaagaaaacaaacaaccccatcaaaaagtgggcgaaggacatgaacagacacttctcaaaagaagacatttatgcagccaaaaaacacatgaagaaataggtattttcttatataaccttagtacagttatcaaattcaggaaatttaacattgatagaatgctttgtatctactttaagtttatatttcaatgttgtctatcatcccagtaatgtcctttgtagccttattttctctagtactggatatggtcacatgtcacatttaggtggcatgcttttttagtgtcttttaatctggagtagtagttcagtgtttatctttcattccattgacatttttgaagaatgaacatcagttattatacagaatgtttcacattctgttttgtttgtgtttcctcgaagttaaactcagcttaagcaccctctgtggaatactgtgtaagtgatgctatggccttctcagggtgtttgattcctgtttgattgatttctggtcttccctttattttctctcttattttgtttgactttaactcgcttttctttttctagcttcataagatgaatgctcaggtctccaatattcttcctttttcctttctaaaaataggtgcatttaagttttgacasgtattatcattaagttcaaaatctatttcttttttcttttcttttcttttttctttcttttcttttcttgagacggagtcttgctttgttgccaggctggagtgcagtggtgtgatgtcrgctcacctcaacctccgccttctgggttcaagcgattctccttcctcagcctcctgagtagctgggactacagatgtgcaccagcatccccggctaatttttgtatttttagtagagatggggttttgccaagttggcaagctggtctcaaactcctgacctcaagtgatctgcctgccttggcttcccttagtgttggaattacaggcgtgagccaccgtccctgggcccaaatattttctaatttccattgtcatttctaatctaaatccatgtttgatttataactatgttgcttgatttccaaagttagagatttttcctagttaactttttataattattatcattttaaatagagaccaggtcttgctatgttgcccaggctggtcttgaactcctgagcttaagtgatccacctcagcctcccaaagtgctgggattacaggcatgagtcaccatgcccaacctgttttttgcagttatttttttgtaattgatttgtatctgaatttcatgaggccattgaatatacttataattttaaaaaatgggccaggtgcagtggctcacgcctgtaatcccagcactttgggaggctgaggcaggtggatcacgaggtcaagagattgagaccatcctggccaacacagtgaaaccctgtctctactaaaagtacaaaaattagctgggcatggtggtgtgcacctgtagccccagctatgcgggaggctgaggcacaggagaatcacttgaacccaggaggcrgcggttgcagtgagccgagatcatgccactgcactccagcctggcaacagagtgagactctgtctcaaaaaataaaataaaaatttcagtgtttgtaatgtgttgagactcgctttatggttcatcatatagacaacttgtagcaaattttctttgtgtatttgaaaataatttgtatttttcagttgttaagtgcactgctctgtatgtcagtgaagtcatagttgttggttgtctagttcaaatctgtgttgctgttcatggtttgcttgtttgtcagttactgagagacttcatgagtttctaaacatcattgtggatgtgtctttcttttggttaattttggagtgtgttattagatgatggacatttaggattattaaccttttcagttgaccttttattgtctttaattgttcctcttttatctttaaatatactttgtgaagacttgtctaatttcaataaaactataccagcttttttgattaatgtttgcatggtatatattgtcattcttttactttttaaaaaaatttttaaaaattttgaatttggaaataattagctacaggaattgcaaaaatagtatagaggggtcctgtattagttcattttcacactgctaataaagacatacccgagactgggcaatttacaaaagaaagaggttcagttagactcacagtagttccacatggctggggaggcctcacaattatggcagaaggcaaggaggaacaagtcacatcttatgtgggtggcagcaggcaaagagagcttgtgcagaaaaactcctgtttttaaaatcatcagatctcgtgagactcattcactatcaggagaacagcccaggaaagtcccacccccataactcaatcacctcccacaacaggtgggaattgtgggagttaaatgcaagatgagatttgggtggggacacagccaaaccatatcaggtttcttgtatttttgacccagtttaccccagttgttacatcttatgtaactataatatgaaaccaggacacttaccttggcacagtgtgtgtgtgcagttctcggtgatttcatcaggtgttgattttgtaatcaccactgcagccaagatgcagaaccattccaaccccacagggagcttcctgtgccacagccactcctgtccctctgagccctggccttggaaaccactcatcagttctgcatctcgttttaatatcaagaatgttacataactgaaattactcaatatgtgatacttaaaaattgttctattttttttccatattgtagtgatatctgtattatgtgatttgttttttgaggttggcctatttcattcaacataatgctgtgagagccatccaagctgttgtgtaggttgtgtcaagtttttggatattagaaataaggctgccatgaacaattgtgtacatttgtgtgtgtggatgtgtgtggacagaagttttcatttctctggaataaatgtccagaaacttcattgctgggttgtatggtaagtgtatatttagctttttaagaaactgccaaaatatttcccagagttgctgtaccattttacatttgcactagcagtgtttgagagatccagtttattgtcactgttgttgattgtagctgttctagtagatatggagtgatggttcattgtgtttttcattcccattttcttaatgctagggaggttggacatctttttgccatttgtgtactctcataagtaaatgtttttccatctttaatttctacttgtgttgtttattatttttttcttgttgaatttggagagttctttacatattctaactatgggtcctctgtcagacatgtagttggacatattttctttctttcctttttattttattttttttcttttttttgagacggagtctcgctctgtcacccaggctggagtgcagtggctcgatcttggctcactgcaacttccgcctcctgggtccaagccattctcctgcctcagcctttcgagtagctgggactacaggtgcccaccatcatgcccggctaagttttttttgtgtattttggtagagacaaagtttcaccatgttgccagtctgtatcttgtctttccatccgttgagattcagagagacttcactggatccagtgtttttaattttggtgaggtctgaattattgcttttgttacttttgtgaattgtgcttttggtgtcgcatctaagaatttcacagaactctttgttgaagatgttcttgcatgcattttatagctttacatttgaatatttaaaaaaatttttttggtgaggtgagaggtttaggttgaagttcattttttagccagtgcgtatccaratattctaataccacttgattgtacatgagcggrgctgtctgtggccttggttctgttctcttctccatctcatcagtgtgtcagttcctgccagtaccacacagtgtgctgtactgtggctttatagaaaatcttaacatgggtaggctaattcttcttacttttttcagaaatctttaagttattctagttcctttgccttcacttagaaattttagaataatcttgttcatatctacaaaatccttactaggattttgataggacttgtgttgaacctatatattttattagtttgggggggattgacatgtttcctatgttgagtcttctagatcatgaacatggtaccttttgctccgttttatttgaagataatttgatctctttcactagcgttttgtagttttcagcatgcaaacattagatttactcctaagtgtttaactttttggagtgatcgtaaatggtttggtattttaaattttggattccacattttctttgctagtgtgtagaaatacagttgattttgtatgttagatcctttatcctataaccttgctgaactcactggtgctaagagtggttttgtagattccttgtaatctataaagacagtcatgccatctgcagatagcagtggtattacttcttccgttatggtctgtgtgccttgccttgtggagctggctggaacgtacagcattgtgcagtagcgagaagggtcaccgtcaccttgttctttcccaggtgggagctgacagtattgcagcattaagcagatatggactgtgggttttttaaagatattacttaactaaaccmaataactatttgtagttttttttttttttttttaagaaatctatcttgtattaagaaacaaaacaaagcattggcaggagaagtggtctaatacatagttttgtcagacccagaaacaggctctggagatgtaagttgcagagtccttatcattgtggtgatcgtggaagccacacagaaggatgatgttcttgaaaaggttgggagacatgtggtatacctctgtgaagaataaggaggtgacacctttggaaagaggatgtattggaaaggaagaatagtatccatcctctttggcatgaggaaaactaggggaggaagaatgaaatagtggtggtgactgtgacttctattctcaattgggaacatcaggtcaattragtaaggatatgattargattcagacgagggctgaaaaaaatgggaaaatttggtcacgctttggtagagatcatcartaatcagcaaaggaaaatcaataataatttgtattgaacttggcataaatttatggtgatgagtccatcagggaagagcctgggtgatgacagagctggctgaggaagtgtggtgtggggagttgtggtgaggtaggcccccacgacgttgtgaattgatgagtttgtaggggcagagagttgactgctaccaatttgcttaggctaagtgcttttcttctgtggtccatatggtcccttcttaaagaagatgggtgttctcaccactatttacagccaagaaccggaagagtcccttttgtgacagctaagagccagcccagaaattgaaccaggtcctgacctggtgacctaaagcccttcctttttgcaccctggactgggaactttgctaggataaggacgcgtggcccgaagaagaccctgatttgctgtctttgaagtggaatagctctgtggcaaatgcctggtctccccatcctagaggtacatcaccatggagatcattgggttgagaaggttgaggatctgtktccaggccgttaggtgattttttgtgtgtgtggaaaatcactgggtattgggggagactgcaggatgttcatagaggaagtgggaactgggcactgatgggtgcagtgctggggacatgggcaatgcagtgttcatggtggggactcttcacagaccctgtgtgttgtggaagtgatacttatttggccatatagtaacagtagcataccagcactgtactagtcaggtagttaacaagaattgcggactttagaatgttctcagtctcatcatagtgttaaatagattattgaactaatttttctggtttttcacatgattttgtttttaccaagtgaaatgtaacagccaaattttaggttttacttataatatactccttttcttaaggaaaatattaagaatatacttgaaaatatagatggtagcagcaaaaacacccgtgtttgcgggagttaaaacagcttagtaaaatatcctagatttgtctaggaagtctttatctttttttttttctttttgagacaggcactctcttgcccaggctggagtgcagtggtgccattatggcccacagcagccttgacctccagggctcaagcaattctttcaccacagcctcccaagtagctgggactacagtcatgtgccaccacacccggctaatttttttatttttatagaggcagggtcttyctatgttgtctaggctgaaagtctttattttaataaattgtgatcatgtggaaaaagctagctgagccatcttggcaggctgtaatcagtctatattggcactaaggaatgtcctactgccatatgggatgagaagcgacctgaggtattgtcatgctgttcttattcaggagatacctgctacactgagaaatcrttatrgaaattaaaccctgcacgttagagaaccaaactatacatttagcaagtagattggtcttctttgtttcttataaattttcagttgtgaatgtttgctactttttaatttcccaaataccaggcattataaaattcactgttactaacattatttggtggctcaaagaatagatttatacagttagtttaactgcaggaggaaaatgtttggaatcttgcaatacaggtagattgtaactaktattaatgagttgtaaatatttaagtgtatttctatttgtagatcctgtaagtagtaaggatcattttaaaattattattaaaagactgagcgagtaggctttaatttcttcatggcttgagacctgctttctcatttttatttgacaaaaatcccaacttggacactttgaaaaaattgttctggtatctgtcttttaaaactttgaatctttttcatgtgagtgaatacacctttctgtaagcggttgtgagtcatattgatagttctctgatctgggttaatgtctttctcacgagatttacatttcacttgttatcaaaaatcactttgtccttaggaaagtggwgccagtgaatggcatttccataagaggggaggggaggtatcaaatgctgggattattcctagttctaatgtcctcaactaatcggcagacgttgagggcacagaagcatgggcgaatgtgctcatcttttaagaagacatcagcattgtgttgcttttaaattggtgaccataggtatctattggatgtaataattgtctaatttttggggggtggagagaaaggaggctaaatctgtgggaattatttaactatgactagttaacattttagaagataggctcttgatgtgttaatatgctttgtttaatgttatgatttgattatagaggcattttgtgaaaagctactaatcctaaaacattttaagaaaamgtataacttgtacactgctggatatagtttcagctggacttgatgatgtaaggcaatttaaatataagggggaaagtgttcctgaataatcrataatttagaaactatttcgcgtacatagaaatgctattgagtaaagctcctagttactgtctcccaaggacttctgtttgcttctccctygttgtgcaatatttgccagtatgctttcctcacatttttgtcctcaaaaattccccatatttcattttcctttttagctctactactcagtgaggcttaaacatactgttttcgttacagtgtttatgtatccttggggctcatgccttttactgctagcatggaagtcgcctgactcccctgtatagtggtttctggctgcatgatccaggggcagttctggtgcacctgcaggcctttcacacctcatgcctgttgcragtgtattcattcagttttgtatagtagcacatgatatgatagtggcgtcttaaccactactttattctgtctgtacacaataaaattattagtagcacagtgatacaaataacataatttatatcatcaaagtctaggcatcttagatttactggtrcagggttatagaggaaaaaactgagtaaaatgttgaatatttatgtttttagcagtgggcattgaatttagagtttctcgagtgagagtgatgtcagtgaggcattagttcatgtagttgctgacagtgatggtgacgttaaggtttctgttgtgctgctgtttacagtgctcatgttatgcagacagtggtcttgcgtttatagtgtcgtttgtctggaagaacatgttaatatcagataatgctataaagcttatattttctaaattttatatgtatcttttcaaatacttagatcttaatatttgatttttcattttgaatttgtctgacttttgtatactagaacatcakagtagataattatgtgtcttagagcaaaaattcrtatctgagtccgttcctgaagaattttgctctatttgaaatgctgaagagaaatgtgctcatatgaagcctgtcttgcacctgtggcccagcttgcaatgtgctctgttgatgccactgctgtccagtagaactcactgtagtaatggaatattctccatctgggatgtccattatggtagccactagccagggtgcccactgagctcttgagatgtggctgatgtgactgaggaactggatggtaagttttatttarttttaattaattgaaatgaaagttgccacatggggccgatggatgctcatttggacggtccaggcctgggtactctttgtgcccaagctactgttgggaggagggtgaccttttgagtgggatgttgggaggcaggagagtgaagaccgaggcctcgggggcttcctccgtgggcggcattgtgctgagccttcgtagtgtgtagactccactcttgtcagtgctttgcagatgagtgaacagagactcagaccaaggagcttccatagggtcacttgctggtgattgtctccaaaacatgactttaaaatccatgtttttccattgtgttttgttgcctgctcacaagtgattcatttttttyccatcatctcttgaatggctgtggtgccatgcctgggctgaggaaaggcggtgcatgaacttgagcaagagctggcctctgcctgttgtcagctcagtgaatggacatgatactgatgtggcgggaggttgagatccaggctctcgtttcaactctgccattgcctagtggtttagtcttagagaagtcacttgcctgtgggacctccagttttcttgtctatgtgatgtgggagttcggcatcagtatagtgtagttgcagttgtctgagatggtaattcttaggtaacataactaggattttcctggcactaggagtgtgtgctgtcaccagataaaagagtgatgatttatagctgctgttggtgggaggagttggggaaggagtgcccatgagcccctgccatgggggaaggcgactcagagtagaagagagcacagagcagtcgcagtctgcatggcaccacagcagggatgctggagggaaggaggcatgtgagagtgttcgagatggacagtacaagcaagaggtaaggtgagagaaatagtcattgaaagcttactctattttatttgaagccttatttaatttttctttcattcaagcataaacagataaaatattatcagcattttattgaaatctacttgaccatttcctttcctaccctaccaaaaatattaatggtgaacatacttgttttgacaatcttaaatcactttaataccaccctgatttataactgttgtggacttgaaagtatgctttcagtttggaggtgtttgggtttattgtttcaaaagtgctgatggcagtgctaagatgttccactcttgcaaagctcagtctttgtgtgctgcggtagaagttctagaataagggtggggggagctggcttgcttggctatccccrtggcagagcatcagccccgtgagcgagcactgcttaagggagcagtgcttggcagtccttcacgtgctggaacagtccctgttagggatgggcagcctccacagaaccaacctctgacctttcagtgtgaggatcttcccagcacagctgagaattaagtggatattcatagggatagtaccaacttcagttgagacacacacacatgccctcataaggaatgctactatgggagatttatgaagtttacttcatatattcaaattcataaattcaaatactgaaacctgcaagttttcagtatttgtaaagtgatttctaaagcaggagagcattacgattatatagtaagggtgtggcactccagcatgggagacagcaattctgagatggagctctgatgtgtcagcctcattttgtaatcagccttatgctgtcattttcatgcaaaactttttgttaacttttaagcttcctttgtcacaaacatgaagaatatttgacttatacggcaggctttctattctagccttgaatacaattagaaggtgagatttaacaacttcctttagtaagccattctgagtctttctctacattttgaaaatttaaattaaaccaaaattttaatmctgaagtttaaattcatgattattttgtgcttaaaagagatgaatttgataccttttcatcattttctgaggtatttttagaaactctatactgtctaccccaaaataatggtttggatgaccaagaaggggaagagttgtgctcctgaaacccagacactattggaacagggtaaatgtaaaattaaaatatttactgcatagatgaagagagctatgtggaaatacagtcaagcttttattatcattagaatatcacaggaaacatttgtatcctctttaaatattggattgagctgtctttttttttttttttttttaagatggagactcactctttcgcccaggctgaagtgcagtggcattgtcttggctcactgcaatctctgcctcccgggttcaagctattctcctgcctcagcctcctgagtagctgggattacaggtgcctgccaccatggctggctaatttttgtatttttagtagagacggggttttaccacattggccaggctggtcttgaactcctaacctcaggtgatccgcctgcctcggcctcccaaagtgctgggattaccgatgtgagccaccacgcctggcctgagctgtaagtcttaatattgcattagttaatactactggaaaagtcattttttaagagtggaaaaagtgattattacttcagagaatgagccacatcctggattaattgaaatccaaggacctttatcattgaaaagtgtattgggaattaccagtaggtaacctatagctatagctataccttttctcgacatatagagcattgactgcttcagaatattaatggttttattttgccaataagagtgtctaaacagaaagataattcccctggggtacatttatataagactttgtattttatgtcaaatttaaatttgtgtaaccaacctattataagaaaaaccccacaaattagcattaggtgtgctattagtgtgtggtgaatacagaaacaatcaatattgactctaaatatgtacaattagtttgaacttttttaaaaagcaaaaaaaaatacacaatacgtatcttttgttncatacagttgctgtggttggctgataaatatttgtcraagaaagaaagarctgaaagctcgcacmgtatggcttggatgtcctgaaaagtgtgaagaaaaacatcccaggaattctataaaaaatcaaaaatacaatgtgtttacctttatacctggggtaagactattgcattcttggagatgggttgtgtgtcagarattgctggcttcctttgctataggatggagcctgttgagactctgacttaggtattgagttgtgtcacatccaaatcagtgtccttttgcttttgaaccatctgtgttcccartaatcgctaaataattcatatgtatttttaatggctacatcatagagttcagctcaagaaaatgtacaatttgattattgccttcagttcttgataaacatcatatttatattattttagaaatatagacataatgaagtaaaagtaaataaaattaacagaaaacaagttrtacgttttgtttgtctgggaactagtttggagaaaacagtaaatrtaatgtttaaaccctgccaagagatttcgcaaagaaaatgaaacaattttttatactgaaatgatacagtaacaaagtatctgtaatatgcatatttatatatagatgtctttgctacttcacattataaatctcagaccttcttatattgttatatcgttagttatctttaattgggtattattgctaaatttaaatactgtagtttaaatattttattacttttgttgctagtgatattactggcttaaattataaaacagttcatatacaattagaatagttgaataatttttgtgttttgtatgtcattccttattttaatagatttatttatctttctaaaggaaaaggaagctggtattgattatatttctatatcaaagtttttggcatgttttatgtcttttatttgcaagaaaagctcttgattacatggaatgtgggttgctttatcttgtatatttaatttaaataatcatgctgacattgtatttggcattgattttactcccacccccacctcatccccatccacctagtgattggcaaatacttgatatctaatgcacttctttattaaaacccacaaaactaatgrcttcataattaaaagacagaccttttgtcaggataataaaatgtaaactgtcttacaggcagataaatattcgcatctttattgaatgaagccactgttttctgcttaggtttaaattattaaatactcacagatctcagagattggctaagcagtgtacgttttcctaaaggtcagcaggttcagtcagtagactgtagagtattgattgcagtcgtttaaagccagcagtgcagcttaactttgatcagtgtaagtccacacagcctgcccagattggccrcatgctgaaaatacctgtggatgtgactgtatgatgattaccatgtgtatgagttttttatcttagatcgtctctgaaattagtcttttcatctaaaatgtagtattttagaaacatttggtaattacccagtaggagttctatgtcatttttaccacgaatggcaatttctaagttgytaatagatataatttatgctgagattttaaagaaatcactaaggaaaaagcactttatttcctgctgagattaatttatgaaataattcaaaacattcttagacagcaggttgaacgtgattatgaacataaatatattgtcagtgtaactgattttgagtcccacacattgccgtatgatgatgcagataacctcattttctgaaaacaagttgcagactctctagttgagcaataagcacttaacccattgccctgcttggtgaaattttcataccttctaagtggcatggaaatggcatccaaagagattgtgatttgtaagttgcaggtttgcaagtttgatttaattgtagtgtgctgtttgaattattctcatctgtaaacgtaagttttgttccattttgattttcaatgtaaatctaataattagaggcgtttgtaaattgagatctattaatatgttagatcttgggttttcttctctaaagataactatttaaagtgaaaaccaaaaccaaaacctttcagtattgacattcctaaaattttattgaatgatgaaatttcttttatatttgaaaatattattaagaattaactacccaaagaccataagagtagctgggtagctgtcttcttgaaaactggtctgcaattacaacttcttatattttatcatttttaatgttttgagggaagtaaatacccacaagagattaaggcagtctatctcrtgaagttacacctgttcacgtttggcttgttcattcwgtctttgtaaagctacctggatgtccgtgttaaaaaaaaaaagtggctatttatttgttttttaccatttcataaatataaggttaatatgacttttccattgtaagattttctgagtcattatcaagatacacctgtatatttactggcttgctaacattgggaaggttttgctatctaactttttttcatgttcatgtaaagacttactaaatgagtatggaaaactggaaaatttcatataagaaaaataaaaaaacttttagatgacatttttaacaattgaacgtcctaattgtcttattttcagtttatttaaaatatattttgggagtaaccttacctttctttgtgatacagctattagaaagccaatgtgaaaattaatacatttactttgaatcacaacatattctcactgtttgatggaaatgtggttatatgttgtgcagattttaattgtttaatttaggtattaaaattttttccttgaaggaattttgttaattttctcttttcctttttaggttttgtatgaacaattcaagtttttcttgaatctctattttctagtratatcctgctcacagtttgtaccagcattgaaaataggctatctctacacctactgggctcctctggtaagaaaagactttraaaattaagttaaattatgaaatatttagaatatagttttaagagttgagatggttaaaagttaaattgaccagatttttaaaacatggtgttgtagtgttcactgaacttctgttaaaagattttgctgagtgatttcagtccctctgagaaccatgggaagtatggtggcagcacctgcctgtagagctgccaaagttacaaagtgcctgagctggcagcagaggggttttccttggtcattctgcacctgtgttaaggttgcaggtcatcagcagctccctcctgtttgatgcagctgttgggaatgggkgctggggctgtgggtctgttctgttactctcttcacaccctgaccatggtgagcattctgaagtatccaagtgcagtacgtatgatttctggttgatatctcagtgtataaagtttttcaaaaggccagtgatgcaatgatgcttatcaatgaatgtttccatttcaaatatatgctgtcttgatagtcttaagctgttggctgagagttttcattaatttttagcttgtagagacaagatgtacatcgtctttcctcctttcatagaaaaatgtacttactacttcctttatttttattttttatttttggagatagagtctcaccctgtcactggagtgtagtggcacaatctcggcccactgcaacctccgcctcccgggtgcaagcagttctcctacctcagcctcctgagtagctaggattacaggcacacctggctaattttgtggttttagtagagacggcgtttcaccatgttggctaggctggtctcgaactcctcacctcaaatgatccacctgcctcagcctcccaaagtgctgggattacaggcgtgagccactgcgcctggccactacttccttttttttgatttgctcccttttgggcagatgacccgaggaatctaggtaggaaacacagagagtgaaagggttccttcagtgaaagaagagtgcagtcctcggggktccacatgagttgtggccttccacatggcgagccgagcagtctgctcccgaggggtctgtcctggcctgggtaggctccgtctccctaaccagagaactccagatgaagcaggagaactggaaggtggactaaattcttgtttcctggagaggcacagtcaggctttcctgtttacctgttagtaaagccatgctgagggaaattttttgatttctctttcacatagacttcatagtagggtggatttgaggaatgagtaactttatatgtaatataaacacgaaattactagataaatgaatacatttktaacttattaaattagtaagattgaaagagacattggagctgagcatgggtaaaactgtaacactgtggcgctcatcccattaatatagatgccgtgagctcccccattagtgtgcatagtgtgcatgcatgcctgtgttgcctttttggagggtcattggtaatatatatcaaagacctgaaaaccagattcagcatttttacttgaggaatttatcctaaagaaataatgattgacttcctcttttcctaattgaatatcctttatttccttctcctgcctgattgcaaattgtccctgtttgcagatgacatgattgtttatctagaaaaccccatcgtctcagcccaaaatctccttaagctgataagcaacttcagcaaagtctcaggatacaaaatcaatgtacaaaaatcacaagcattcttatacaccaacaacagacaaacagagagccaaatcatgagtgaactcccattcacaattgcttcaaagagaataaaatacctaggaatccaacttacaagggatgtgaaggacctcttcaaggagaactacaaaccactgctcaaggaaataaaagaggacacaaacaaatggaagaacattccatgctcatgggtaggaagaatcaatatcgcgaaaatggccatactgcccaaggtaatttacagattcaatgccatccccatcaagctaccaatgactttcttcacagaattggaaaaaactactttacagttcatatggaaccaaaaaagagcccgcatcgccaaatcaatcctaagccaaaagaacaaagctggaggcatcacactacctgacttcaaactatactacaagtctacagtaaccaaaacagcatggtactggtaccaaaacagagatatagatcaatggaacagaacagagccctcagaaataatgccgcatatctacaactatctgatctttgacaaacctgagaaaaacaagcaatggggaaaggattccctatttaataaatggtgctgggaaaactggctagccatatgtagaaagctgaaactggatcccttccttacaccttatacaaaaatcaattcaagatggattaaagatttaaacgttagacctaaaaccataaaaaccctagaagaaaacctaggcaataccattcaggacataggcgtgggcaaggacttcatgtccaaaacaccaaaagcaatggcaacaaaagccaaaattgacaaatgggatctaattaaactcaagagcttctgcacagcaaaagaaactaccatcagagtgaacaggcaacctacaacatgggagaaaattttcgcaacctactcatctgacaaagggctaatatccagaatctacaatgaactcaaacaaatttacaagaaaaaaacaaacaaccccatcaaaaagtgggcgaaggacatgaacagacacttctcaaaagaagacatttatgcagccaaaaaacacatgaagaaatgctcatcatcactggccatcagagaaatgcaaatcaaaaccactatgagatatcatctcacaccagttagaatggcaatcattaaaaagtcaggaaacaacaggtgctggagaggatgtggagaaataggaacacttacactgttggtgggactgtaaactagttcaaccattgtggaagtcagtgtggcgattcctcagggatctagaactagaaataccatttgacccagccatcccattactgggtatatacccaaaggactataaatcatgctgctataaagacacatgcacacgtatgtttattgcggcattattcacaatagcaaagacttggaaccaacccaaatgtccaacaatgatagactggattaagaaaatgtggcacatatacaccatggaatactatgcagccataaaaaatgatgagttcatgtcctttgtagggacatggatgaaattggaaaccatcattctcagtaaactatcgcaagaacaaaaaaccaaacaccgcatattctcactcataggtgggaattgaacaatgagatcacatggacacaggaaggggaatatcacactctggggactgtggtggggtcgggggaggggggagggatagcattgggagatatacctaatgctagatgacacgttagtgggtgcagcgcaccagcatggcacatgtatacatawgtaactaacctgcacaatgtgcacatgtaccctaaaacttagagtataataaaaaaaaaaaaaaaattaaaaaaaaaaaaaaaagaaataatgattgatcacaaagtctaaagaatgtccattataaatattttaaaaagtcgaatgtctaacaatagattattcaaactgccatatcctgtgtacttgttggaatactgtgtagctttaaaaatggtgtttaggaaaagtgttkaataacataaaagttatgyatgtattagaataaattttaaaaggtggctcaaaatatgtatagaakgaaatccacagttcttttgatcaatcaatattgagctccttcatgtccagccatagtctaggtaatgttgatacaacagtgaacaagacaaaccaaatcctgttctaatagaactaaaattctgggagaaaaggcagtatataaactcctaatgccacgtagccawccatcaggctatgaagaagaaaatataaagcaggaaaaatgagtagaggatgaaagggttattctatatgggatggtcaaggaaggcctctcctgtgaggtgacattggaatgacatcttactggtaaaacagtcagatatgaaacagggaagagtgttgcaggcagaggagtaattgcagaaggtcttggactgttttagcatgctccagggtgggaggaggtcatccaggagggtgtgggtgggaagaagtagttggaaaggaggtcagagggcctggcgtcaactcttccagggctctcagatttcatcctgggtgaaaaaggaagccgtatgtttgtgtatatattgcatgtattcacacacagaagaaacactgaagtgtatacaacagaattttgaaagttgttgttgaagctaggtaaccgtggaagagagtatagataactgtttctcctttcttttctccaccttccaccacattagcagtaacctattctgaatgtgagattataattcctatgtatctcttaatagttttactgtgtttatatttatcattaaaacaatatgcaatattattttgtatgctttaacattttttataaaggttatcttaatctgtgtggcctattgcaacatacttttttggcttaacatttgtttataaaattgatccatatcaacacatatatctacttcatttttcacttcactaaagtgtttcattgtataaatataccacaactgattcatcccttcctttgggaaaggagactttggggtcgtttctcattttttaccattataaatattgttaaacaatatgattgttcataagcattgttataatgaacaatgtgattgttaacgattgcttatgcatttgtgcaaaacattctacaggctgtgtacttcctagaagtctcatttaaaaactgctgttgatttttttcattttctaataaaagcagtatagcattatagaaactttagaacacagagaaaaatacttgctcattttaaaacacaatcatattgaaygtttttkttttttttttttttttttttttttttgagacagagtcttggtctgtcgcccaggctggagtgcagtggcgcgatctcggctcactgcaagctccgcctcccgggttcatgccattctcctgcctcagccttccaagtagctgggactacagatacctgccaccatgccctgctaattttttgtatttttagtagagatggggttttaccatgttggccaggatggtctcgatctcctgacctcgtgatccgtccgcctcagcctcccaaagtgctgggattacaggtgtgagccaccgtgcccggccaattatatttatgattttaatgtatttatttctagcccctttttttctattcatagctttcacagttgtatttactgcttaagtatcgtttcccggctgggtgctcgtaccagtaatctcagcactttgggaggccaaggcggcaggatatcttgagttcaggagttcaagaccaacctgggtaagatggtgaaattccatctctaccaaaaaatagaaagattaattgtgtgtggtggtacatatctttagtcccagctactcaggaagctgaggttggaggattgcttgagcctgggacacagaaattgttgtgagccatgattgcgccactgcactgaagcctgggtaacagagcgagaccgtgtcttaaaaaaaaaaaaaaaaaaattgccttgtgggttaaaactgttttaacttaaacaatgatggtctgagaacacaaattcttcttaawaaagtaaagcaaatgtatttatrtatattttgcttcagccttttgtacttactctgatttaactaggtttcaaccaaagaaaatgtccttttgatggttctttctgaagaactttatttgatttgttcacaaaattgatgatcttggccatacttgagtgaagtgtgcacacaagcacacacacgtctgtttaccaagacgagaaaacgtttctctgttttttcttttcatatgattgttcatttccagttccagctgcaatttttagtcctttagcttgaattttcatcctctgttattttgaagtactttatcattttttgacatgtattagctttaattatttttagataattacctcaataagcaactacttcaatattcatataaaagatactgttattccactatatttgcgttttaagattttagagaagtgaaaagccactttttccatttgaataatgcttgacgttgccttctgatgcacctagatgagttctcttgtgtcctgagtatcatattgttcgayctgagaattgatttactttttaaatgattttctttmgttccttggtttggcagcagccacaattgatgctacctttcagataacaaatgatgaatagtatgctttctctgtttatatgcatcttaacctttgattgagcaaacctcttaaaaagttgatgtacaccttaggcttaccttcaaatctgagaagcaagcttaggagagcatattgattcttttaaaaagcttttaaaaacgctgaaaatcaagacaatttgaataattagacaaagttaaggaataattaaacatacactaaatctaaagaaatctctttaaaggaaactatttaaaataatgcaaatttgaaaatatgtataggtgtctcttttttaactgaagaaaatgttcttcaacaagaattcctcataagcccttgagttcttgcattttctataccagtttatattaaccccattatatccagtgccagcaacaccatcatctttatacatacattgacttctttttgccatcttttgttctctaaggttctataatgttctcaagaaaaagatatcagttaacatttccagatttcttctagccaaaatcctgcctctgaggcataaaaccattttacagttgtcggttgtaaaatcctatttctgttgttcgctaattttaaataaaacaagttacttcaaacttactccctctgttctctaattaaaattgagatgtttttgaaaacaatgatagcttaattaataatatttctttttcagttgcttttggtaatattatttattagctttaggtctgaactaatttctgttatacttcccatataatagaagtgtaaattgaaaataagttgatttcattacatttttgtgtctggatgaagattacttttcatactcagctttcagaacaattctttaaagcaaagcttgtgtaatcagagtaacaaaacagaatgtcatgcttctatcaaaatgaacgagatggaatagatctgtctatgcagaagatctttagataaagaaagctctggctctaacagtttttaacactgtatcttctatataaaatgtcttctgctactttgttaataaataattggtaacyggataggctatgtaggtgagaaatcaatctatgaggactttgatttttcagtcttatttaaaaatcttcccttcatccactcttttctcgtgtgcgtgtctctgcattagaggtgtgggcaaagtaagaaaaggaaaaacgaatgaaattgcttggaatcatccagagacaaccattgttagtgatctgtgtggccttggtaaggttacttactcactttgtgtctcaattcccttatctgtaaattagaggtaaagatacatactttgtaggatttttgtgatatttaaaaggggtaactcatttaggatacttggaaaagtgtgtggcacatgataagccctcaaaggcacatcaataatgtacccatctaactttttctccttttacaaaaatgtatattgttttggactagctccgcattgttcttgggttatctggagaaataggagaaaggctgtggacaagccacgtgagaagaagtccatgttgtccagtctgtgtaacacacttgtgcccaaatactgctgtttccaggatgacagtagtttaaatggcccttcttgcttccagttttgatttttctagggagcagtgttatagcataaatctctgaccttgttggtaccgaggtaatgggaagatccaagtgctcctacagtaagacttgcttactccagtcctccataaaccaccaatctgtaatgatccatttaagaactcagatctaaactcttacgggtagaggctcatttgttgtagactccagtggtagaaggaaatagtggcctcaacttccctttcctttagtgtcttttatgttcctaggctggccattgggcatttccttggatagatacgcaggggatggrcgtgatggtggtgacatcttttgggtgttgagaatcgtacacatgtgttacttattcagagaaacagatttggaagtgtgttgtaaaacagcttggacagtctaatagtccttgcctgtgacmaggatcttgtttcctcttaagagtgtttaactcctgttttcaggacttaggacctaaccctctttattctgtcttctctaatactacttcatttgaagtgggagcttaatttcactgacttccttgagttcttaggaactagcacatttttgtggcttatgattactcaatgaatttggttaacttttgctgtctttaagccataagtttaaaggggtgaaaattagagtcacctggagagtttaacatatgtgtctgaggtctcttccctggaaattagaggtaaaagtacacatttcaggtagggtctgagcaaatttatgttacaaaaaatcttttcaggtgattatgatatgcttacctgattaaaaaacactcctttaaaatattgtctatactatataaataaaatgtgcttggtaatcactttcattctcttatctcagtgagtcacaaacagaactttttttaagaagttacctctgcatcatgaacatgagtctgtagcagtaagtcttctcttacgtgggaatagctgcagacaagtatatttcttggattcaaagatgcatatttttcatgttactaaaattaagctgtggcttataaaatgtgtatatttacaatgctattgtcttcccacccaagactactactaaaataatactgacgtatcttaaaaccagtgacatctttgaatcaaggaaatatagcatttcatcatatgactgtgctatgaatttcttacttgtggacattcaggttatttctaatttttcatattcatgctgtgatcctataatttttcctttaagataagtttctagaagtgaaactgcttgtttaaatatgtgcaaattttaaggcttttgacagcaccaactttcttagaacttttttggggatatctgctgctttggcttttcatattcattttctttgtttttctgttgctaactctagttcaataaaatgatgaatttatattcaagttcttctttgtctctaacaggctttttgataaccacttttatttcattgctgctttgtcrtaacttgttaccagctttgaagaaactggccatcattccctattgtatattcttcactctattatggagacrtttatcataatataaaaatttcttctgttcttaaaattttgtacttcacacagctgacatcactcttaatcataaaagactgaatgtgttccccttaaacttaggaacaagggtgtttgctcccaccagttctgttcaacattgtatagggcagttagttaagaaaatgaagtaaaaggcatctagatggaaagaaagargactgtctatctctagtcacagatggcatgatcttgtttataggaaaacctagggaatctacacacaaaaacattgtaactaaacaaaatgaattagcagggttgcaggatacaagatgaacatacaaaagtcacttgtatttctagcagtgaccatcccaaaatggaattaggataacaattccatttataatctcatcaaaaagaaaattataggaataagcttaaagcatgaaattacataatgaaagctataaaagaattttgaaaaaaaagaaaggtctaaataagtggaaagtcatgttcatgagttgaaagacttaatattgttaagatggcagcactctccaaactgacacacaaatttaatccaactcctaacagtatcctagctggctttttttttttctttatgtttttaaatgtttttgcagaaattgacagattgatcctaaaatccatatgaaaatgcaaagggctcagagtggctaatacgtcatagaaaaaagtagatcaaagttggagaactcacactttcccattcccaaacttattacaaactgcatgatcaagacagtatggtactgacataaagataggtgcatagatcagtgtaattgagagtccagaaataaacctttaaatttataacacattgattttcaactcgggcaccaaaatagtaacttttataactcaacaactaaacctaggaaaaaggtaggtaaaggatctgagtagacatttacccaaagaagatatacaaatggccaataagcatgtgaaaagttgctcaacgtcattagtcagtagaggaatgccagttaaaaccagagatactacttcacacccagtaggatggctgcaatacaaagggcagacagtaacaagtgttggtgaggatgtggagacattggaaccctcattagttgctggcaggaatgtaaagtggtgcagccactttgaggagcagtttggcagttcctcaaaatactacacacacaattaccatgtcacccagaataggcaaactcatagagacagaaagtggatgagtcattgycagggcctaggagtgggagggaatgggtatggtgcttcattttgggatgatggaaatcttctaaaattagatgatggtgayggttgtacaactctgtgaaggtactaaaaaacgaattgtatacwtttatagtgttaattttatggcatgtgaattatatatcaacaaagctattatctaaaaaaagaatacastgtgtgctaaaggacctaagtgaggtcttactctgctcatcagctggtgtcttcagtggaaaccatggcaaatacatggcacatgccgtgccatgcctgcyttctttgcagatggggcacatcacaaattgttcatggcttctttttccttgagtccaagagtggctttaggatacttctcaaaacagtgcttccaacaacccctgggaatacactggcaaagatcagaaagacatcatggtgtttcaggagactactcatagttccctggtgttgaaggatacagcaatattgagtgggggacaaggctagagatctgtctattcgtaaggttaggggtttggggagagcactgtatttcattgggagagctggggagagcctgcgtccggctggggtgccacaccgagtacagtcaggctggagagatgtgtggaaggaagcacagttagcagttggaggaaggagccatagtattgcttatagatgatggcagtgggatgggtagagaattaggccatcagtgggctgaggccagctttggggtgactggataaagaggggtgcatggcttcagaaagacagccaggagaatgtggtgtccaggaagccaagggatggggaattggaaagagggcctggtgaacaattggaatgcacagaggaatgggaagtttcgtgagatggtctgccttacttgagaatarttttagtcaagtggtggaaggaaattgtggcaagtggagaagtatactggatatgaaaaggtttccgatggtgcagagtgcagactaagggaggagaagasttgatgtgctcagggagagatggttgtagggccgagggaggctcatgattagggggagagcacacagtatggctgaagagagatggcagaggggctgaaaaggagtgagarasacaggctgtcaggttgattttgaatgggaaagagactagaagaatccatgtttaagtcatgactgttgaaggggttttcaaataggacacttgagaaaaataccatttcagtaaatacaagaaacattcttcagcagcacacttaatttggcctattggttatacagaaaacaaaaaactgaaataaaaaagattattgtgctttcagtggacatacatccagtgttctgttatttacagttktgactgaagcaaggtcatcattaataatagagattgacttgaagaatattcctgtaacatgtcagaaaatatatatgcagcctttaaaaatgatgggcattagcttcatattagtggtataatgggcttcacaataaattatgagaatataaaaatttttttctagctagcatcatattaatacaggcagatttttacttaaaaagtgagatgaaagcactataattgttcattctactgcagttatataataatgcactatgtaagaaaatcgatgtgtgattatctgggaattgttttgtgttcctaaatacttttattctgtaagaaaaatttaagtgcagaaattaagtgtaagatttttatgtcagtcattgtaaattttgtatttgaatgcccaagtattctaaatataatttgtggatttattgaagattgttaatttctttttctttgggttactaggtattttctgacacttagcttgaagtatctattaggaggtgaattaaaaatttggggagtatactaagagttgcataccttttacaatgaatccttttgtaatatttcattgttactttttgacttttttggttttcatttattttatgttttagagagtaatataaattgaaggaaaaaagttaaaccaagtaacaaataattttgtcttttttgttaaagtttagttttctaaaaataccttattttgttttatagggatttgtcttggctgttactatgacacgggaagcaattgatgaatttcggcgttttcagcgtgacaaggaagtgaattcacaactatatagcaagcttacagtaagaggtcagcaagatgctttaatcctgcttagcgtttgcttactgtaattatcattttagagttaacataacaaatgtatgaaaacattttaattctattattgaaaatagtattatgtgattgtatatgatatctaattaatttccttataatgtataatgcaattttagggtagatatttgttcattctctagctgtttggatgtatgttgtgtacacatatatacaaatgcacacacaaccacacaagcatgtacatgtattactaataatcatgtaatgtgttctattggtatatacgtattttctgagaggcataatgtcacttyatctaaaatctatcttggtattttaaacacactcataaaggtcaaatgtctataccatggcattaacctattcttaagtacagaggcctttgaacaacagaaataaatatcgtgatccaagatgataactgatgcaagcacacttctccttaaccttcattcagggccttaactcttgcttaacttacatccttcaagcgcttgtttatttgatttttcagtccatagtacaaaaggaagcaatgtattaagaagagagtgggggaaacgatgacaagtaggcataagatagtaaaaaagtgactgaaaaccttgggaatgagggagacactgaaaaactgaatgggtattcatagtaaccccaaagtctgtttaaaaagtttgcagtggatttttatcttttgtatgtatataagaggacatttacaatgaattatttaacttgaaatagtaccttcaaaaatgacttatttttaacaccttattgggctctatttcacataacataaaatttatccatgtaaagtatacaattcagtgtttttggtgtattcataaagttgtgcagccatcaccaacactgtcatttaagtttagcatacttttgacattctcagaaggagccctgaatacatgagaaggcagtggtcgttcttgctgtttccctccccaccctaccccagctccaggcagccgccgttctcctttctgtctctgtggttttgcccactctgcacatttcatatcaatggaattatgcaatgtgtggtccttggtcaccagctgctttcactggacatgttttcaaggttcatctggtagtagcattcatcagtacttcatttccttttgctgctcagtaatgttccagtgtatgatagagcacattttgtgtatccattcattagtgggtggacatttggggttgtttctactttgtgaccgttgtgaataatgcagctatggacatttgtgtacaagcttttgtgtgaatattgttttcatttatcttggatacatacctaggagtgagattgctggattatttggtaactctatgattagcattttaaagaattgccaacctgctttcctaattggccacaccattttacatccccaccagcaatggatgagggttccagttttcccacatcctcacctgtacataactctctgcctgtttgattgcagccactgctttttgattatagtgggtgtgaagtagtatctcattgtggttttggtttgtattttcctaatgattaatgatgttgagcatcttttcatttgcttattagctgtttgtatatcttttctggataaatgtctgctcagatcctttgccgactttttttttttttttttttttttttgagacggagtcttgttctgtcgcccaggctggagtgcagtggcgcaacctctgctcactgctacctcctcctcccgggttcgggcgattctcctgcctcaacctcccgagaaactgggattacaggtgcctgcactgcgcccgggtgattttttgtatttttagtcgatacggggtttcactatgttggccaggctggtcttgaactcctgacctcgtgatccacccgccttggcttcccaaagtgctgggattacaggcgtgagccacgcccatcccttttgccaactttttaactgggttgtttgattcattttgtgtatggggtaaggtgtgggtccatattcttttgtatgaatatcaggttgtcctagtatgacttgttgaaaacaatgttttttctccatggagttgaaaaattattaaaaatctttgatgctcgaatggtggtgtggtggaggaaggatgaagaaggtaagccttagtattggagaaaaaaacccccaaatggcccggtaaattgtgtataactttgcattgtctttgtaagaatataatatagatctatctgatttttaaaattgttgtaatggaggggctaggcagagatgtttttctggtgtattaattgtattattcagaaataactagagtggtgatggcagtgaaatggcagagttggcggctccatatgcctgcccttccacagaaacattgaaaatcaagcagaaactgttagaactaactacttcagacctctagaaaagtcaaaggtttacagcacccaggaaattgctgcatccagagaaagtcaacctagaaacagttggaaagctttttccccacaattgtcctgatctcagcaccttctcccaacactgtaacagggcactaatcttgaagataatggcccatgttcccagtttgcagcttattccaaataattgtttctgcctctaaccagtcgggggactgcttggagggttgaccctaggtgcttgtcttttttcacctaacttgaactcagggcagaaaagtagaaatgtagcgccatttctcaaacatatgcaaggctaatgaatagcctgtagtagcagagggcaaaagatgacagtcaagccagatagtagagtgtcaaatgccaggcagaagaagctagggagggagtttctttgggaaatttgagcattcaaaaattcccctgtgtatgctggggaattttggaagcgacatgcaagccaagaactggaggaatgctcagatccaaagtctttccctctggccagtctctaggctcagtgcaagaaggaagggaaggatgcagcacagttgttaatggcctggctaaatcttcagtgaggctgccgcacagagccaggctccaaagcccaggacaggttttgtttgggtttgtttcctcctcccccctgcccctcctttttctctcttcattttgaaggaaatctttgtcagaacactggctgaatataagaatggaagagagactttagagaccatccatgataaagaatacacactttacaaaaatagtgtagaaaaatcagtagacaaacacagctacagcatgtaacaataaaatcaaccaagaagagggagaaatagctaatttccagaattaccagattataatgtatgtccagttttctttttttctttttttttttgagacagagttttgctctgttgcccaggctggagtgcaatggtgcgatctcagctcactgcaacctccgtcccccggcttcaagtgattcttttgcctcagcctcctgagtagctggaattacaggcatgcgccaccatgcccggctattttttgtattttgtagagatggggtttygccatgttggccaggctggtctcraactcctgacctcaggtgatccacttgccttggcctcccaaagtgctgggattacaggtgtgagccactgcacccggcgtatgtccagttttctacaaaaaacattacaaagcatgcaacaaaacaaaatgtggcccactcccagaagaaggtaatrgtaactgcccctgaggaaagccagacatcagacttaggagacaaaaagtttaaatcagctgtcttaaatgtgccagggcrctcaaggaaaccatggggatgttgcttaaaagatatcagaatgatgtagaarcaagtagagaattatctaaaggaagcaaacaaattctggcactgaaaagtatagtaagtgaaaagaacactcactggagggattcagtagcagaattgagcacaccaaagaaacagtgaacttaagcctaggtcagttgtatttatccagtttgaggagcagaaagagtgggaaaaaaaaaacaaaaccgctcttaagagacctgtgggacagcatcaagcgtaccaaatacacatgatggagatgcaagaagtcgaggagagagagagaggacagagaaaatatgtgaaggaataatggccaaaaactttctaaatttgataaaagacattaatctgtacattcaggaagtacagcaaagcacatgaaggataatacgagaaaaatccataatgagatacataaccaagcagctgacacccacagaccaagaggacaccctgaaagcagagagagagagagaagtaactggtcacacacaaggaaccctccgtaggatttatcagaagccatggaggtctgaaggcagtggggtgacatttttaaaatggtgagagagagagaaaaaaaacctgtcagttaagaattctatatctggtaaaactgtcattcagaaatgaagaagttttctgggcctggtggcccatgcctgtaatctcagcactttgggaggccgaggcaggtggataacttgaggttaggcattcaagatgagcctggccaatgtggtgaaaccctgtctctactaaaaatacaaaaatgagctgggcatggtggcatgcacctgtaatcccagttagtcaggaggctgaggcaggagaatcgcttgaacctgggaggcagaggttgcaatgagctgagatcgtgccactgcactccagcctgggcgaaagagcaagactccgtctcaaaaaaaaaaagttgttaagacattcacagataaacaaaagctaatacgctttcgtgcatctaagggcattatcaaaaatgtaaaaagaaagaatgagagaaaattgtatatctgataaggatccagtatccaggatacataaagaactcttacaatttcaacattagaaagataacccaattagaaaataggcaaaggacctggacaggcaattctaattctccgaagaaaatatacagatggccaacatacatgtgaaacgacagtcagtcaacagccttagaccagagggaagtgcaaatctctatgagacatcaccatacaccactaggttggctgtaattttaaaatatagaatatcgagtgctggagaggatctggagaaattagaatctttgcacattgcttgtgggaacaaagtggttcagcagctgtggaaaacacactgtcagtttctcaaatagttaaaaagaatttaaagcagggacccagtgtttatttagtgtttattcactattcacaatagccaaagggtgataatagcccagatgttcactaaaagatgagtggataaacgaatggatagcaaatttctatgatggaattttattcaggcatagaaatcatgaagggttgctacatgctacaacctggatgaacctcaaaacattatgctatgtggaagaagccagatgaaaaaggtcccatattgtgtgacttcatctataggagatatccacaattggtaaattagtagagataaactgcagactggaggtggccatagatgagcggaagaagggagcacgaagcatctgcctaacaggcattgggtttccttttttggtgatgaaagtgttttgggacttgatagagttggtcgcactgcattgtgaatacagtcaatgccactgaatggttcactttaaaatggctttttatgttacgtatgtttcacccaaaaatggcataaaatgttgaggaagaccttctgctgttacgtcttttgtacttctgtgatacttgaacttcaggtactttaaaaataattttcagtatgtttatttcaaatgtacatgaaaatttaccatttaagaaaaattagccatcattgctggtcatctaagaagtagaagtttcacatgtcaataatgataatgatagctacttttttacttccttgtgtgtgtcagataacattcagagtacgagttctcatatccagcatcgtccaagcgggagttgatgtgctctccgagttctagatgagaaagctgcggttcgtgaatagtttgccctgagccacagtagttttaggtagagctggtgcttgaacctagatcattctgactctaatccagtgttctttcagctgtggcacactgcttcatggctggtggttctgatacagatgtttgatgagtaaaatccgtagtattaaaaaatgcatcagtttaggcttattattgagcacagtttaaaatttacttttttattaagaatattttctgttgacctcctcctcagtttccagtatttcacagttacctctttgaatggcattgatggcagcctccttgtgtgcctttctgtagtttgctggaccatatttacaacatttggactgtgtcattttggagttctcaagcacattcttatagaagtaaactggaagaatgttctctgttacttttttcttttgaaaaggaaagccacttataaatacgctttgtttggaagcagaaaatattttaaccagtatattatcacaatcacactgaaattattttgagttatcttgtgttttattttctgataacttttttgggtgtaggaattttctatgtatgttgctgttactttactttcttcttgtttatgactgcttgtttttgttttgttttgtttttagtagaggcagggtttcaccatgttggccaggttggtctcaaactcctggcctcaaataatgcacccgcctcagcctctcagagtgctgggattacaggtgtgagccaccatgcccagcctttcttgaagtgtacttaaatcatttttgtttccgtggtctgacacctgagcagcatttgaaaaggatccatcccagtatttcattcaggaacattcagtatacatcctggtattagattggtgcaaaaatagttgcaccaagtaattttgtcattggaagtaatggcaaaaaccacagttacttttgcaccaacctgtatttctgctatgtaatgatatttcatgaacaycttccattttttattattagttctctgtggctggaccaaggtagatatactcagatgtggccatatagactcaggagtggttataaamacacacacacacacacacacacacactcactctcaagtgggtagatacactcaggtgtggccatatagatccaggagtggttataaacatacatacacacacactcaagtagatacataaactcattaccactgtttcttctcaggtcacccttagaggatctgtgtgaattcatttcttcatgatatatcaactacaagtctttccatccttccttttcacttgagatgtgtgtgctacctctaggtctcaccagtgcttctaaccagggagatacttcttagtcactaaagcsgactgaggtctgccccccgcagcctttgaacagcccttagctgggcctggctgatgggactttactggcggccctgcagctcctggcctggctccagctctgactccagctgtctcttctgtccgaagtgggaaatggactcctcactgctgatactgctccatctttcctttgcggtagcactctcctttcaaagtaaaaagtattttccaaaagtgcatctgatgccattttatggcttagaacccttgagtcgcatgtgactctccagctccctgtggcctggctctggccacctgctccagctccttctgtgatttccgaagtgtggttgtactggtttttcctttagttctttggataggcctctccttttccctcttagagactggcttttaaagtaatagccactctgtctggtggttcttgttctgtcctgtactgtttggccacttcctactcaaaacttcaggttttattaaaagattatcttagagagttctgcctcgatttcttccagtgttattccccaccccagcccacacatacatcccatggcacctgtacctccctgtggggagtggcgttactctgaggactactttaattcctggactctcagtttcgtgagcttggggtcctggtttcccccagagtaagtagagtcattggcatggcatgtggtgagcactcagtgaactgcgggagtcaagaaagaaagaagttccagatccagatgaaagtgctgagcctggtctaaggccagggggctgccctgtgagatggcaccagtttgcgtttccattgtgccaacaaatgtccttccttgcccactcattccagttaaaaaagtttcattgttcatttgtgatcttttataaattacttaataccttttgtttctttatctatttttaccttattacaatttttctactaaaaggaatttgcctttgtcacatgtagcaaatgtttttaccttgacttatttttaaaaaatcatttttcttggatgtaatgtataatttttatataatttaaatatcctgatcttttgtgatttttactttaatcttggaaagtctactcattccccatataagtgagcattgtgttttcatacagtgtttctggattttcattttttgtagttaaggtttactgcatttgtaattttacacttaagatgtatactatgtggagaagggatctttcttttcttttttcccccacaaatgctcagcagttgttttgaaaccatgtttaaagttagcagagttcttccccagacctttgagacttaaccaggtttgttgtccaaggactcagaacatgagctggctccactgaacctgtgcctctcagcctgagtacagtatgggccttatgtgcaccagagctaatctcaagatgaattttatgttttatattacttaacatgaaaagccccagactccaagtcatccttcagattctgcattttaattaccatgggatactgtgtatctttattcttacccttggtcttgtttcactgtgcttccagaattcatgttctgtttttcccttcataacctgaagcttttctatctatggattcttctctgaatgtgccttcttgctctcattaaactgtggctcttttctgagggcccacatcctaaacagactctttggtagctctagttttggctcctgtagccttagtgccactccacctgcagttaggcccctctttccggctcattctctttagtgcctggacttcagttcgttttcaacctccagtttattgactttgcatcctttctaccattcctagccccttcgatcttctatttgaagaagtccagttggtcagttttatttatgattgtgcttttgttgttctaagaactcttttcctaacccaggttttacaaatgtttctttctgctctgtttctcctgttttcttctagaagtttttttagttttaggaattatacttacgaatatccattttgagtctatttttgtctactgtgcagagtatgggtgtttttttgcatatggccattcagtcgttgtcagtactgttttttgaaaaagtgatcctttctctactgcattgcctttaaactcttcatgtaagtttatctctggaccctctttctgctccattgatctgtttgtctgtctgtaaacatcatgctcttttggttactgttgctttataatttttgaaatcaagccttccacctttgttcttcattttcagagctgtttttgttaaggaaatacaaagggcctacatctaacaactaatactagtgtattaatacaactaattattaatacaactaattaatacaactaatactagtgtattatttggcttaccaatttctacaaaaaagccttctgcagttttgaatgggatttcattgaatctgtaaatccatttggcagagaactgacattttaataatatttaatcttttgacccatgtgtgagatacatcttcccctttaaaatttttttctcagcagtgttttgttgttttttgagggttagttgtcttttatctcagctttcaatattttgttactggttttgagcgatttgattatgatgtgcctaggtgtaattttctttatttttttatgctagggattcatttaactttttgaatctgtgggatataagttgcattaaatatggaaagtgtttagcctttatttcttcaaatattttttcttccctctccagtgtcaaggtttccagttatacctgtattagactgtttgaggtagtgacacattcattgatgtttttaaatttttcttttaaattcttttttctgttttattttgcacagttctattgctgtgtcttcagatttactgttctttccttccacaaggtctattctattgtgtgttagtctgttctcacgctgctaataaagacatacccaagaccgagtaatttataaggaaagaggtttaattgactcacagttcagcatggctggggaaggcctcaggaaacttacaaccatggaggaaggagaagcaaacacgtccttcttcacatggtggcagcaaggagaagtgcaaaaaggggaaaagccacttacaaaaccattagaacgcactcactatcacaagggtaacagcatgagggtaaccgccccatgattcatttacctcccaccgggtccctcccacaacatgtggggagtataggaactacaattcaagatgagagttgggtggagacacagccaaaccatatcatactttaatttcatttgttgtattttttatctcaascattgtttttgtgtctggaagtttgatttgggtcttttttgtatccttcatgtctctcactttctggtctgggaatacagttttcatagctgttttcatgtccgtgtctgctaattataacatttgtgtcagttgtgggtcagttttgattgaatggtttttctcctcgtatgggtcatatcttcttgcttctttgcatgcctattaattttttattggatgtcagacattgtgaattttatctttttgggtggtggatatttttatattcctgcaaatattgttgagtattgtttgggatgctgttcagctacttggataggccttgctttgttrcatcattggacagatctggggcatgctccatggggttggttattccccagcgtgaggccagacgtgctctgtgggtcatgggcttctccagtctggctcgaagggcactttgtaaacatgggcattctctgttccttttggatatcccccgtcactgccttcctttctggacactcagtttttctcagcatgcaggcatgttctccttcaggaactctgccctggcccttccttcagcctctgcatgctcttagatgcctgttcgtggcctccgcactgtttcctgactcctggctccaatgcctccttttctaggcgtcctctcctaaccctgcaacagtcacagatgcccacctttgctctccaccagcatcctgggccgtgtgctctgccctcatttttccatagcacctgctacattccagcatgccatacaccctttaaaggtgtgccattgtcactaatgtagcacaggtgcctgcagtaggaactggaatgtagtaggtgttgaggaaatgggttaagtactgtcttcagattttgtggaggtttgctgtacttctttcttgaagtatgttctcagtgctttaatacattttaggaattcatccatttgaattcgcttctgtggagtgttttacagcctagagtagtaatgccatctacatcataagataaattgtaactttttgttcaactagaatttttaccagtatttatgtttattaggtaagaaattttagaattagctagaagatagcagtaattttgttcaactcagtttattggaattatttttaggaacgtttatatgaaatatgtggatgttgtggcctgcaaagaaactaatatgctcaagtgacacagttttacatgagaaagctccagcctggacctcagtgtttttgacttacatttcacacacctttgcaagcagaatggagaggaatcctagtttgttcactcagccacttcatcacgaaatgtttattgtgtacctgcttagggctttggcacatcccatttacttacttaaacgatatgcctcaaactctacagagatacatggatgtgagtaatttggcaatgagtctacctgcttttgcagttgaagatcttagagatctaagttttgtttactttgatcagcatattcatttagtttacttgtgaggtggtaaactatcatctcaactaaatttgtttatagaaaagtaagttatactttatttcactttaatggatggatattaagatgtaatgattaattactagaagtattagaaccttctgttcattattgttgttcttacattaaaaaaaaaaaaaaaaaccagtattggccgggtgtggtggctcctgccgtattcatagactgatgtgggtggattgcttgagctcaggagtttgagaccagtctgggaacacggtgaaatctcatctctacaaaaaatacaaaaattagccgagtgtggtggtgcgtacttgtagtcccatctactccagaggctgaggtggggggatcatccgagccagggagatcgaggccacagtgagccatgattgtgccactatactccagactgggtgacagaaaataatttaaaaagttacttaattatctatcactcataccttgtgtgtgtgtgtttggatataaatacatttttatccttagttgctagtatttgtgtttagtaggtcttactttgctatgtgccttaatccgttatgacattgactcattttaactacttaggacattttacttaggttgtaagttcctttgattttaaaatgggttaattttttatagtaaatccacaaaccagtaatgtggtcatttattatcattatcaagtctgttcagtacataatcgagtgtgctagactttgacacagctgcagtgctgtggatgttttgcagcaggatgttttataccacaaacacgtgactccctccttgtgctgcggtggcacgtcagctactacatcactgggacagtaagaagttttcagctccattatcatcttgttttccccaaagtggctgtattttattttgttttcatttttatcttttaaatttttgtgagtacatagtaggtatatatatttgtgggctacatgagatattttgatgcaggcattcaatgggtaataatcacatcagggtaaatggggtatccatcccctcaagcaggtatcctttgtgttacaaacagtccacttacactcttttagttgttttaaaatgtacaagtatttttgactgtagtcactttgttgctctagcaaatattgtcttattcattctttctatttttcatacctattaaccatcctcgcttccccccacaactcccactaaccttcccagcctctggtaatcacccttctactctctgtctccatgagtttaatttactatgggtaaattttggatatgcatttggaaagaagaaactacatgtcataaaagtatatttcagttaccctttaaacctatcgtaggatctgaaatttagtggatactcagatatttaaatattgatagcattttaagcacattatttacaggtatatataaaatattactggtgttaatgtgggttattaaaagcttcacagaggttagacttgctgtgtcattaagtctgggaagggagggatttcaatccaagggagcaagtgctgggagcttctgcgagtaagtggagggacgaggttcccggtgaggtagagcaggggccgacagagatggaggagccagctggtaaagcctggcagctaacttagggtccattttgaggaacttatattttttgatacaaatatgattatcttctaaataattatcatcaaatggaattttttgggggggaatttctttagtttttttcaactcattcatttggaattagggaaattatagtattatattttctttacacgggcagaaattaatgactggtagtggggttggtgggcaggttatatgtttaagaagcattggtataagaacaggtggttatggccaggcacggtggctcatgcctgtaatcccagcactttgggaggccaaggcaggtggatcatctgaggtcaggagttcaagacaagcctggcccacatggcaaaaccctgtctctactaaaaatacaaaaaaaaaaattagccgggcatggtggcgggtgcttgtaatccagctacttgggaggctgaggcaggagaatcacttgaaccctggaggcagaggttgcagtgagtcaaaatcgcaccactgcactccagcctgggcaacaagagtgaaactccatctcaaacagcagcaaaaaaaagagtaggtagttatttggtatacatttggatctttctcagaggagcccatataatttgttgttcatgggaacaagtgagatgaatgcttttcctctatgaggaaaaacccacttgtgctattatgtttctgaaaaataatggaagggaacatttattgctagaaagatttagtggaaatatttaattgaaatagtttagagagtggaaagtactgttgttaccttacttggcgataccgtttggctgtgtccccacccaaatctcatcttgaattgtagttcccataatccccatgtgtcatgggagggacccagtgggaagtaattgaatcatgggagtggttacccccatgctgttgtgatagtgggtgagttctcacgagatctgatggttttataaggggcttttctccctttgctcggcmcttctcattgctgccaccatgtgaagaaggacgtgtttgctttcccttcaccattattgattgtaagttttccaaggcctccccagttatgctgacctgtgaggcaatgaaacctctttcctttataaattacccagttttgggtctgtctgtattagtagggtgagaacagactaatatacttggtcactattaactagttcattaaaaaacaaaaagctgataatacacgacttactgagtgtgcacttgatagtatattgaataggatagttttaagaaaaaaatatgtcattagatttaaatactagcatttacattgaaatgtctttgctactgtattagagcttccttctctatcaagtgcaactctgagattattaaattctgagtgtccatttcctaaacactttgtgtcgtcgattgctctgtaagattattgaggccaggtgacagttgtgtgttttatatgtgcccagtgactcttaaaattgggagatttttctgtttttaccagcctctctcaaatctgatattagtatattactaggatcagttgtcagctccgtcaacaaagtgttagccagaaatcaaatatttaatgtaagtgtaggctgttagaatgtggcagaaaaagtaattcatgctggaccttcactggtggacaggtgtgtgaaagcgggtaactttcctcccctgtgttctctgtccagtgccttaaatgttctttggcaaagaggacagcaaataagttatttaagaagctaggacttgataacaatatgatcatttcttcaaaatttagatatgtgtactttgagcagatatataaggcaggtggtcatactattttgttactgtactctgtttagctttctaatactttgttcattgtgtaatagcattttgagaactttttatgctgtatttgatcataaacttttttcgttaaacatgtaattgaaggtaatttccatagaaattaatcgtgatcactatataatgcctgagaattaaaggctattaaatatgttaactctcttaccgtgctacagaataataaatctctcagaaatgttagatcttaattacagagtcagaaaggatatgttttctattcaaaatgttttaaagttatttactgtattatgtgttatgactgtagtgtttctttttctctccttttaagatgtgttgattacagagaatgtgaaaaaaatagaaggaaagaagggtgaattggatagctaggagagagggtgaaattagatgatgaagtaggaactttaggtcagtggggcatctctactgccggatgctttgctgtgaaaagcatagcagtgggggaggaggcctgaagctcctaatgctcataggaattaaagtggacattttattacaattaatgattttaaagctcagttaagatttgtttcacacgtaattctaaagaccattgctattttataatataaataaaaatagcttcagcccttattggcttgtataattgaggcatgtagaaaaaactacaacataatgcatataaaagttttgatatatccaaatctttaggaacagtgtgatactactgaaatacagctgctttaagaggtatttgggaaatacgatcttttaataagttggatatgggtctaaaagtcagtgtaacgagtgtgatgttagtttttgatagctgtcaacataaactgaatgtaaaaggaaggaacattttcccttgttaggacagtaattacaaaaatgtaaaaattaacacacaaggccattgctagtcttaaaagagagtgagacagggagagagtgaggaagtgagggaaagaggttgggagaggcccaggaagagaaagaggggcagagacagacagaaagggaggaagggagggaatgaatttgcctgttttgttacgtgtgtctcaaattatgggtgcaacattcatctactctacatcatattatacatgatatttaagtatatatgaaactttgtcaacgactattctacattagatgtttcgtagataagaatttattcacatagagaaatcacttttagtaataargttttagatataactttttcactcttctcctgtgttggtaaagctattgatagagggtgattttacatataatttgctttatttcttttttggtcagttatgtgctaattaatgccatttatgatattaacttaaggatttttacatctctgtgttaagttttaatgctgagatmatttagtaatatttctgatcattgttgacttggaactgaaacaattacaaaacatgggaataatcttctgagtgtagtccccttttaaattactacgaagaaattctccctctgtttttattgggagataaaaaattatttgtgtttggcagtttactaagagaagttaattattagtgactgtctgaaagtacaagtatagggaaatttctaaagtttttttttctgtagcttatttctaaagtaattattttttaattgaaagttgaacttgggtgtgctgttgtttccttgagttgactgtacttcttctttttttaaggtaaagtgcaagttaagagttcagacatacaagttggagacctcatcatagtggaaaaggttgatgattttttaatatattttagacctatgtatgctagttattaatgtttagcctgattataagtaacttctgaatttgaaagaaattgagacatgtattttgaatcataatatccttgtgtaagatttgttgtatgtgaagaaaaatctagatttttgtatattgttttgctaaagtatatttcagtgtgtgcaggcaaagtcatattttttctgaaataagatggttaactgcttaatgttgcattatcaagattattttatatcatcacagaattgtattcaaacctgttcataatactgtgcttcagttttcagaacttcctcctacagggataatcatccctcaatatccatgagagggtagttccaggaccccaccaaggataccaaaatccacagatgctgaaatttcttatataaaattgaatagtctatgcatcaataaatcctctgtatgctttaaattagtggtccccaaccttttcagcaccaggaaccagttttatggaagacaatttttccatggaccaaggttcagtgggcttggttttgggatgaaactgttccacctcagatcatcaggcattagattctcatgaggagtgtgcaacctaggtcccttgcgtgtgcagttcacaatagggttcttgctcctgtgagaatctaatgctgctgctgatctgacaggaggcggagctcaggaggtcatgctcgcttgccctcccctcccctcytgctgtgcagcgccattcttgaaaggcccgggkttagggacctctgctttaaatcatctctagttgatttatagtacttaatacaatgcaaatgctatctaaatagttatactgtctttttttatttttgttttattcttattttttatttttattttttttctgaatattttctctcaatgcttggttgaatccccatctatggaacccgtggatacagagggccagctgtagttatattacacataattattggatataattcatacagttaaaaaatttaagagggaaaagtgaatagaagtaaaagcattacaaaagaagaagtttagatcagtgtacgaagaagctataagaaaaacatcaaaggtccaacgtggagattgtcagggctgctggcggtgtggagagtgactgaaggtgcaagctgcatgtcgggggagctggcggtgtggagagtgactgaaggtgcgggctgcatgtcgggggagctggcggtgtgcagagtgactgaaggtgcgggctgcatgtcgggggagctggcggtgtgcagagtgactgaaggtgcgggctgcatgtcgggggagctggcggtgtgcagagtgactgaaggtgcgggctgcatgtcgggggagctggcggtgtgcagagtgactgaaggtgcgggctgcatgtcgggggagctggcggtgtgsasagtgactgaaggtgcaagctgcatgtcgggggagccggcggtgtgcagagtgactgaaggtgcasgctgcatgtcgggggagcyggcggtgtgsagagtgactgaaggtgcargctgcatgtcgggggagctggcrgtgtggagagtgactgaaggtgcargctgcatgtcgggggagctggcggtgtgsagagtgactgaaggtscaggctgcatgtcgggggagctggcggtgtgcacagtgactgaaggtgcaagctgcatgtcgggggagctggcggtgtgcagagtgactgaaggtccatgctgcgtgtcgggggagctggcggtgtgcagagtgactgaaggtccatgctgcatatcgggggagtgcattcggagtgttctcatctgtctcatccctgaccacgtgagtacgcaggacacctgtgtctgtgttaagggagttcgttcctaagtgctctcatctgcctacttccatgactgtgtgagtaaaaagggctcaggtcacacacaagaaggaagaaattggaaacccaggaacacatatcagaggaaaccaactgaaaacaaataataaaatgcagacgtacgttctaatggtctaaatacgagacagaatggataaaaaacaaaaaaaccaagacgcatttctatgttgtgtgcacgaaagtctcttcaaatacagtgacatagataggatgaaagtaaaaggatagaaaaatagatacaatgtaaaattaaacaaaagtagtaggagctatgttaatgtccaagaaagtgtacttcagagtgaagaaaattaacacagacaaaaagagatgttatacaacaataataggattaatccatcaggaagatacaatgatcataaattgttactcaccaaacaacagttccataaaattcgtgaatcaacaagtgtcagagctgaaaaaagtaggcaagtccagttacaagtggttacttcagcaccacccttcaggcattggataaaagtaggggatagacgctccgcagtgatgtggaagatttgcatagkcagcaggagttgcctagcatgcatagaccaccgtacctgtcagtaggagagaacacatttatttcaagtgtctatagaacattcaccaagataagccattttctgtaccataaacctcaacaaattgaaaagaattgaaatcacacagagtgtgttctctcactgtaatagaattgttaaaaatcagtaaccaaggcagcaggaaaactctaaaacrtgtggaaagtgaacagcacactttgaattaatttataggataggtagtctcaaggaaacaatacatacagctgaataaaagtgaaaattctgcattctggaataagtgggatgcgtgtaagggcactgctgggaggaattctgtagcatgaaactcctgtggggaaacaagcagaggtcttgggtcagtaatctaaacccctactgcaagaaattaggagaagacagcaaagttaaaccaaggcaagcagaaggaagggaataataaagatacaagtagaagtcagtaaaatggaaaataggaagacaagatagaaaatcaatcaatacaaaagctggttcttctaaataagttaataaaattgatagacctttagcaaggaagactgatcaaaataaaaagtgatgtcacaaatcaccagtattagtaatgaaataggkgctttcactatagatcctgcagccattaaaaagacagttatgaaatactacaaacaccttgatgctcataaatagaagaaatggacaaattcttctgaaaccataaagtataagaactcagtcaaaatgaaatagayaatatcartagtcctgtagccaataaagaagctgaattagtaatttaaagctctaggaaggaaatacctaggtccaggagaattccttaaaaccattacagaagacttagcatcaactttgcacagttattttcagaaaataattgagaatggtacactacccaactcattttatgaggtcaagaatatctttatctcagtaccagaaaaaagtacaataaaagaaaactgcagcccagttggtatcagcagtatataaagaagagtaatacatcacaacccagtacaggttattccaggtgtgtaaatgtggttcagcattctaaaatcaagcagtgtaatctacgctatcaacagaataaagaaaaatcacacaatcagttgttgcaggaagaccatttgacttaacccaacactcattcatgataaaaactctgagcaggttggattagagggacagtaacaatatcttgtttaaaaagaatctataaaatacttaatggtgtaagactgaatgcctcctctctgagactggcgacaaggatgtttgctgttactgttactcaatggcacttctagtctgtaaggcaagaaaataaaagatggattagaaaagaaataaaaatgtctcaatttgcagatgacataactacgtatacatgtacataaatacatatacatatatgttgaaaaccccaacggatctatagaaaatctcctggaactagtgagttcaacatcgtgtcaagttataagattgatgcacaaatatgaacctcatttttatataataatgaaaatgtgggcacagaaattaaaaatgcagtactcttacagtcattgctatgaaaatgaaatctatgctgaaacttacaatgtgttgataaaagtaatctaagaaaacataagtaaatagacccatctcttttcgattggagcattctgcattccagttttcccaaaattgttttgtacacttaataccattcctatcaaagtctcagcagggtttttttcttcttatttttaaagacatagatcatcttactctaaaactaattcggaaaggcacaggtgtagaacagctaaaccaactttgacaaggaaaataaagtgggaggaatcacccttgatgtgaaggcatattgcgtagttacattagtcaacatagtgtggaagaaggatagaaacaaaggttaacaaaacattatagagaaaccagaattagacaaaggtgtgaaaacaattaagtggagaaaaggtagccttctcaaatggcgctgggcatcctgaggtttaaaaaaaaagatcatggacttaatgtaaaatgtgaaactgcaaaacttttagaaaaaaaaaatatttagaatctaggaataggaaaatatttcttagacttgataccaaaaggacaatgtgtaaaaggaaaaattgataaattgcatatcattaaaattaaaaatgtgtgccttgtgaaaaccatgtgaatacaatgaaaagctacagatggagaaaatatttgtaaaccatatattcaacaaagatttctgtctagaatatataaaaactcctaaaacttaacagtaaaaaaaaaaaaawtttgaaattagaaaatgagcaaaagatttcaagagacattttgacaaagatttacagatagaaaataaacacatgggccaggcacagtggctcacacctgtaatcccagcactttgggaggtcgaaggggacggatcacaaggtcaagagatcaagaccatcttcgccaacatggtgaatccctatctctactgaaaatataaaaattagttgggtgtggtagtgtgcacctatagtcctagctacttgggaggctgaggcaggagaatcgctagaacccgggaggcagaggttgcagtgagccaagattgcgccactgcactccagcctggtgacagagcaagactgtatctcaaaaaaataaaaaaataaacacatgagcaggaattcnnnnnnnnnnnnnnnnnnnncagctaaaatgaaaaaatggtgacaataccaaatattggaaacaatgtgaagaagcggatcacttgtatattgcttgtggaaatacaaataatacagttatcctggaaaatcgctggatagtttcttaaaaaaaaaaactgtaactatcatactacccaacagttgcactcctggacgtttatcacagagaaatgttaaattatgttgattcaaaaaaacctgtgcaggaatgtctgtatctacattattcacagtagctcaattccagaaagtccatatatcccaggtgggtgactggtcagagaagtagctgtgcgttcacaccgtggcatgtggtgttaggagaacacagggctccttgctcttgtggtgcccctagttttgaggggaagcaaaaagaaacaaaaagtgtccataattatttgaaattatctagtttgtttatgagtactccatagaaaataagacagaataaggacataaagagtctgaatatgacatttttaaaaatacttttaaaggccgggcatgatgattcatacctgtaatcccagcactttgggaggccaaggygagaggatcacataaaactaggaatttgagacgagcctggacaacatagaccaaaatttaaagaattagccaggcacagtggcatacatctgctgtcctagctacttgggaggcttagggaggaggattgcttgggcccgggaattcaaggctgcagtgagccatgatcattgttgaaacgtattaaagagaccaaagtaaatgtaagacagytcatgcccatggttagaagtatgttattcaaaaggcagtgttccctaaattgatctgtagattcagtgttacccctctcaaaatcccagttgatgtctttgcagaaattgacaggctgattctgaaattcatagggacattgaagtgacccagaatggccaaaacaattttgaaaaagatggacaaactttgaatactcgcatttcactatttcaaaacttaatgcagatttacagtaatcagcatttacaggaactagcattacattgagaatccagaaataaactcagaaatttatggttaattgatttttggcaagagtgcctagaaaatttaccgaggtgggagtgtgtttgggcaggtgcttttttggccccatgttctttatgagatacatccatgttgttgtgtggttgttacccacccatttgggtgttatatagtgtggtttttatctgttttcctgtcgatgggtttttaggttacatctaagttttgcccatcatgaaggatacttttgtgtcatatttgactatatttcttggtgcatacatccacacattgctgttgcaggtgtgcctaggagtggagctgctgtgttttgggttatgcagttccgctatggtagaccctgcacgtggttttgcaaagtggtgtaccaaattctactccaatcagcgtgccttggcatgtttgccagcatgtgcattttcagccttttaaaattagcatttctgatatgtatgtagaagtgtttttttttttttttatgaagttctgggatacatgtgcagaacgtgcaagtttgttacataggtatacacrtgccatggtggtttgctgcacccatcaacycgtcgtctacattaggtatttcttctgttgctatccctcccctaaacccagagtgagcaggcaacctacagaatgggagaaaatttttgcaatctgtccatctgacagagggccaatatccagaatctacaaagaacttaaacaaatttacaagaaataaaacaaccccatcaaaaagtgggcaaaggatatgaacagacgcttctcaaaagaagacatttatgcagccaacaaacatgaaaaaaagctcatcatcattggtcattagagaaaagcaaattaaaaccacaatgagacaccatctcacgccagttagaatggcaatcattaaaaagtcaggaaacaacagatgctggagaggatgtggagaaataggaacgcttttacactgttggtgggagtgtaaattagtagaagtggttttaatgcatatttctatgaagtctaataagattcaatactttttcatatgattttgtgtgtgtctgtcttttatatgacaagcctgctaaaatctcttggcatttctcttctgagttattctttcctttcttatcagtttgtgggcttttatgtactctggtttggagtcttttgttagttatatatgcgttgcagatatcttctttcctggcaggctgtgttgaacagaaattcttaagtttaatgaaatctgctattaatcttcatttaaggttagttttttaagacaatttttgttgatggtctttattaagcatccttacctctcaaaaagtcatgaaaatattcttgtcatgtttgatgaatgacgacaattcagtggggaaagaactttttttttctcttttaggcattttattgttttggctttcacatttagagctgtaattctagatagatttttgtgtttacattgaagtcgaggtcaggtgtcgtctcccatcatcccctgacggtactgggttttctcagcgctattgattgaaaacacaattatttcctcactgattggcagtttcatctttctcatagtgtccctatatrtgtggacctatttttggacatctagctttgtattggtataatcgtctatcttggtgtaatctcatcttttcttaactactctagtttaatctagttttattaggttgtacagttaatcctcacatttaatttctctcaacgatattttatagttttttatgtagaggtcttgcacatcttttattggtttcatgctaatattagtttttttcccctagtgttagaaagaaatagctctatccaataacatagctttcttcagctttaacatgttacctgttgactgacaatccatttaccatttattatccatttatttaccatgggtagataagtctttacttaggtctcaaaaatcatacataattcatgacattatgtgacgtattcttaatacaattatatattttttctttagactgatatagctttcccagttgatagaactattagtgataataattaaatgtatgaatagtgacttgttagagtttttatatgccataaaatgtctttgagtttttctgtgtcatgaaagaatatctcctcaaatctgtggggttttgcttgttggcttgttcagtcatagatttattctttcacatctattaagtgttttgtgtatgatgtgctctgttttgtgggcattgcaggaccacagtcctcctcactttccagggccatttagtctaatagggaggacataattttttataaggcaatacctgctgtgttacatgtacagactaacagaggccacagaaatggcaatatttaacgtttttttcagacataaagctttttttttttttttgaaacagggtctccctctgcttgccaggctgaagtgcagtggcatgaacatggctyactgctgccttgaccctcctggctcaagccatcctcagccctcagcctccctagtagctgagaccacaggcatgccaccacactggctgctttttaaactttttgtagaggtggagctttgccatgttgcctcgtctggtctcaaactcctgtcctcaagtgatcctcccgtgttggccttccaaagtactgggattacaggkgtgagccaccatggctggctgacatgcagctttttttttttttttttttgagatggagtctcgctctgtcacccaggctggagtgcagtggcacaatctccactcactacaagctctgcctcccgggttcacgccattctcctgcctcagcctgtagctgggactacaggtgcctgccaccacgcccagctaattttttgcatttttttttttttagtagagacaaggtttcaccatgtcagccagaatggtctcgatctcatgacctcatgatccgcctgcctcggcctcccaaggtgctggaattacaggcgtgagccaccggacatgaagcatttttgaagtcactactacataccattatatggctcacttatggggaaaaaaatcttagcatttcaattaaaatgtgaattaaaatatcaattttttatatacaaattgtgttagttatttcagcacaattttaattatattatcttagttgttttcataggtatttcttatttggaatggaattgtgttaatttgtaaacctgcatatagataattaatcttttataatgctctttgcagaatcaaagaattccatcggacatggtgtttcttaggacttcagaaaaagcaggtatttttacatttaaaaaaacttacctaactgtatattattgcaaaaacaaatttacaaatatctatacaaggaaaaactgttttccttacatttttagtatgctgcagcaatgaggaatattctgtagaaatgctattttactttgaatgtaaacacatgaaacctctgaaaagagagtccacattttcatatgaagctactttacaaagtaaaaacacatgctgcagttacattgctgatgatttagtattttcatagtttaattttcactttaaaaggtaaaagtaaaaagcatcctataaaaattttctttgaatgacagtatattgaattcattaacatctaaattatatttaattgtcaatatttaaaagggtgtttgctgtgaaatatatttgtttaaaaataatcctttcaggacctaggtatccaatgagtgttttcattcagattcatactgacatctaattaaatgatgatgttacttaaaatttgatggctattttgcatttgcagttttattcagcgattcagcaaatacttatttaccacttattattaatatgtaccaggcactaattgttgcttaagatacaaaagggagcaactttcaaagagtttatagtcttggtggaagtgcatacattgacagcaataatcctaactgtataggtactgtactcagaaatgtttggggctatgtgggaacagataattttgcctattgagttgatgcagactttgcagaaaaaatgctgtttatatgacctgagctttcaaaaatactaagatggaaaagaggtaattggatagaagcctagtgtcgccaaatagaaaatctgttggaaattgggaaacctgagtttaaatcactttggcccatttctagttatgtgaccttgccaagtgggcacacgttttcatcatctctgaaacgagagaggtatatcaagtaatatgcagagtttctttctgccctacattcctgacgttatttataaatgaacagtagtttttataggaagctaagcatgttattatttttattaaaaactcatcatatatcttatttctaatgtgaaaactgtagaaaggactgttagatttcagagttgttgatttaatttttctgtatttataaacaacatacttttagaagggacatttttgtcaaagaagaaacatgttttctctcyttttttttttttttttttttttttttttgagatggagtctcgctctgtcgcccaggctggagtgcagtggtgcgatctccgctcactgcaagctccgcctcctgggttcatgccactcccctgcctcagcctcccgggtagctgggactacaggcgcccaccaccatgcccggctaattttttgtatttttagtagagacggggtttcaccatgttagccaggatggtctcgatctcctgaccttgtgatccacccacctcggcctcccaaagtgctgggattacagacgtgagtcactgcacccggccaaatgttttctctttctaccagttgtagttacatggttacttacattgtgagatgaattctgccattaacgggagatcagctctacccaataatcaagtgacttctgtatacttgatacgtttattatgtgttgtttcatgtgagcttttattttcccaactgtggcagggactggctggctacttccagcccatttctctttcctcttggaaacacagctggactccctttcctgcctagttagctggtcccatgtcactgaactctggccaaagagggagagccaaaagtctgtatgccacatctagccctgcgcctaacctctcctgcaggcacctgctcatctcttccgccttgctggttasatggccatgactagggcagtcttggaaactgcttgttaaagatgccaaagcttccgtcagcctggtgtcctgaatgaatgtatggaacagagcccctccccttccattatcaaatggactctatataaactattgttaagcagttccgtttgcaaggttaatcttttatgatagctggtgtttccttaactgatttctcatcctaattgctcttcattctggaagccttcttactaattctctttgcaagtggcattatttgcttttgaagtgttactgcttatattttgaagccatcatttgccaatattggagtataatgtgatcttttttcaagtaattctgctcttcttaacaataatgtaatgagaccatttaggtgcttttgcagtccagtgggtaggctgccttcatagtttgtcacatgtgaatgactcatctcatagtgcattgcttcacagcacagactgctgcgtgggagaagtctgcaggccctccagtccccggaaaggctcatctcctcaaccacagacagaggccagaatacataacctttgatcatgggcgtgtagtccttctgtgtgttgctgggtttgatttgcgactgttttgttaaggctttttttgcatctgtttttaaaggatgtattggactgggcgtggtggctcacacctgtagtcccagcactttgggaggctgaggtgggtggatcacttgaggtcaggagtttgagactagccttgccaacatggcaaaaccccgtctctactaaaaaaaatacacacacacacacacacacacacacacacacacacacacacactagccagtcatggtggcacaggcctataattctagctactcaggacactgaggcaggagaatcacttgaacctgggaggcataggttgcagtgagccgagattgtgctaatgcactccaggctgggtgacgagagtgaaactccatctcaaaaaaaaaaaaaaaaaaaaaaaagaccatgtattgacttatagttttggttttgctttttcttgtgttatttttgttttggtgtcagggtaatactggccttagtggaatgagttaagaagtgttctttcttctatgttttggaagagtttgtgaagaattattattaattctttgttaagcgtttgatagaattcgcccatgaaaccctstgggactggactttactctgatttttaaaaaattactaattcagtttctttacttgttacaggattattcagattatctatttctttccaagtcagttttggtagtttgtgtctttttcataatttgtccactttatctaggttatctaatccactttatctaggttatctaatctgcggccgtgcagttgtttttaggatttccttacagtcctttttatttctgtcaggttggtagtaatgtarcctcctttgttcctgattttagtaattgaactcttctctctttttttcttggtcagtctagcttaaaggtttgtcaatcttgttgatcttttaaaataaccagcttttggttttaatgatttttctcacttgtttttctgttctttatttcatttattggtttctgtttttattgttttcttccttccacttattttctgttcagtttagtcttctttttgtagtttaaggtggaaagttagattatttacttgagggtcttttttagtacaggtgttcataactacaaatttccatctaagtactgcttttgctgtatttcatgaggtttggccatacatctcaaaattattttctaatttcccttgtgatatcttctttgattcattgcttatttatttttagtttttatttttatttttattttatttttgtagagacagggtcttgctttgttacccaggctggagtgcagtgacatgattatagttcactatgatgatcactgtaactttgaacccctgggctcaagcagttctcttgcctcagcctcccaggtagctagcaatacaggcatacaccaccacacctgggtaatttttaaattttgttgtagagacaggctgtgtctgttgctgtgttgcccaggctggtcttgaccacctggcctcacgtgatcctcccaccttagcctcccaaagcactgggattacaggtgtgagccaccttatctggcctgattcattgtttattaatgaatatgaatttcctcatatttatacattttctaaatttccttctgttattgatttctaatttcattccattgtagttggagaacatactttatatgatttctatcctttgaagtttattcacatttgtgaaaaatgtcctaacatactgggtatccttgagaatattctgtatgcacttgaggaaaatctacattctgctcctgttgagtggaatgttccatagattttgttctaggtctgcagcattgttcaaatcttctttttttgttcatcttctatctagttgtcctatccattattgaatgtggagtactgaagtttgtcactatttctctgtttttccttctattctgtcagattttgattcatgtatttgaagttctgctgttagatgtaatatatttatgtttgcttggcagattggcccttttatcattataaactgtcttcagccatgcacctctcttttggttactggttgcaccttttttctgttgtcatactttctacctatttgtgtctttgaacacgaaagtgtgtgtcttgtagacagcatgtaattgcatcatgatttttcattcattctgtcaatctgcttgtttaaaaaatcagctttagttaggaaaattcacatccagcaaaatgtatccatttaaaatcttagcaggtatgtacacttgctaattattattattctccccatccagatgagctccctttgccctgttaccctgcctgatcagctttacagccctacatcagtctctccagtgtctcttctctcatacctggctgtagagttccaactcagaaggccacacaagcatctgactgcagctctgtgaatcagtagagttcactgtgtaacccacagtgttcccgttgactaggcccattcctgaaggcagcttattccagctttctcagtgtttctcctgtctgcctttaccacctgttcattaactcttagccatcaaccctcccctcaaccccgccactttcagctacagctccattgccttcttcctataggcgttgaaacgtgtctctacccagtcaccaaagaccacccccaacccccagtgacccagcacacctatctagctaccatcccgtctctgtcctttgctttgcagccaaaccttttgaatgagatgtttttcgtcatgacctcaccctacatcccctttctctgtgaaatttaaatggtgtttctcaggattctgtcctaagcacrcctacatttgtgatgtacatgttcttcctgggaaactgtaacttcattcatggctttatatcatctgattatacaccagagcctgatgggaggtaggtggcacactcaaaaggttccatcgatctctgcctgttgattggagcctttaatccatttctatttaatgtaattactgataaggcagaatttacatctgcaattttgctgtttgtgttctgtgtgtcttgtgatatttttgtgtctttgttgctccattactgccttcttttgttttaaatattttctaatgtggtgttttaattccccatcatttctattataatgtacttaaaaaactattttgttagtgattgccgcagggattttaactaacacagctcactcttagctaggtttagtgtttttgttgaataaatgctcctggaattctttcaagtccggttattttccagagttctgaaacagttgcttttggcaattttcactagtcttctcattgcagttacacagaagtatattttcagaggtttttatactgccatccctgcttacttcacctacttatttatgatttatttgtcctgttttacaaatgtgtatccagtgtaatgaataacaaaatgctttaatttgggagatgctattgtattaattgcccttttaacagttgtgatagaaatatgtggaagatactattccaaatatgaaaacagttttgggtaattaattaagtggaaaagattatatagattgtgttagaagataaattatgaacaaagtcaagcactttaaagctgaaaggtgtttagaaatgtccacttttcagaagaggaatctgagggctggagaatgtaaataccttgcttaacattatatgactattagcaattttatgggtttgtttgtgtttgtttgtttgtttgtttgttttttctctttttggaggaggtctcgctttgtcacccaggctggagtgcagtggcgcgatctcggctcactgcaacctctgcctcctgggttccagcgattctcctgcctcagcctcctgagtagctgggactccaggcacgccaccactcctggctgatttttgtatttttagtagagatggggttttaccacgttggccaggctggtcttgtacttctgacctcaagcgatccacctgccttggcctcccaaagtgctggggttataggtgtaaaccactgagcccggccactaatagcaattttggaaattcttcctcagcctcttaatgtttcactgcatcatttttaagccatagtaagacagaaaaacgtaaatggaatattagaacatgactcaaatgagataatctattgtgttaaccttggataaataacactttcaaattgatgatgttttaaaacatttctctctaattttgtcttacattccatgttgtagggagaatcactcttcatagtggagtaataatattttgaaggtcgtggatccctttgagaatcttaagaattatcacctctttcctcagaaaaatgtatacactgcacaggcatgctggattttttattgtttgcatatccctggaggattattgatgggttcaagttagggccctgctgtagtttgttttaatctatgcttctattttcatcctcagttttattttttctgtcaaatttaaattgttaaaataatagttactcaaatgcagatattaagaagtcagggctgggcacggtggctcacgcttgtaatcccagcactttgggaggccgagatgggtggatcacgaggtcaggagatcgagaccatcctggctaacatggtgaaacgccatctctagaaaaatacaaaaaatttgccggcgtggtggcgggcgcctatagtcccaggtacttgggaggctgaggcaggagaatggcgtgaacccgggaggcggagcttgcagtgagccgagttcgcaccactgcactccagcctgggtgacagagcgagactccgtctcaaaaaaaaagaagtcagattgttttttcatgctatttttcttcttataaaatagaccaaatagctttcaagctatataaaatttgtgttataatattgctttcaatcaagaattcttagctttagaaattctgtttatgtgatttttaagtaattaaagttatcttattgcctagttgttttcagtagactacaaatgtactgaatttttgtatctactaacagttttaatactattttattgctttttagtttcagtttgaaaaaatctgataatacactgtttattataattacaatattttaaatcttagrtatgatggaagtcctaagtgttaatatatgcagcatatcccagcttgaacactggcagctgggtgcttgtcagtacagcatggtgggttgctcatggcatcgtattgactgtgtattaacacagaatattctgttgggctgtgagctgattgtttagaatgtaaatgaagctgctgatggatctggtgactgatggcttaaattccaattaatcaattacttcatcactttcttaattcagatcaaatatctccagagtgcacacaattcttttagtggtattaagagaaattaatgctttagaactaattttcatcaatctcttataaatgtcaatatctttttcacttgtctcctaagtgatgacattatactttaagtgtttgggacatattatagtacctcagctgtctgtcacttgttagtgggacggggtggtggttaaatgacactgtactcatccacatggtctctgtagtgctattcgtcttgctaccagcttgaaaatttcatgcagagtcattaaatcgtatgaatgatttaaaaattaagtttaatggcagacaatctggtattataaatgcaaagtcaatgcctatctttcttttgttggccgtataccctagccgatctctttcagagctgttggatttgtgagctgttgtaggaagtctactaatattacagggtaacttattatgcgatatgacagactcgtgctccgacggtgtcctgtcagtttcttcagcacacttgatgcaccctcctatgtgacacatacacgagttgatcttaattgtcattaagcctgttgactcttgtcagttgtataaaataaaatcaagtattcataagcagtctgtaataggatataagcaggccaacttagtaatacattttttgctgagccttaactggcgtcagttttagcgagtgctttctgttaaaaaattattagatgcagttcttgtgaaataagtcaagctggccatctttctgatttgctagagttcattctttctctctttaaatcacctcagttattgaaaggttagtatttttaactgtacttaacttgagtaaaagtaataacgttgtttttctctaagtttaaaaaatagcatatgatttaacatgaggcatggcttttttctttaaacaaagtcagctattttttcagtgtttaataagtttacagaaatttagatatttgtttcacttttagaaacacagaatacaggaaatttatgagactccagagattctcacttgtttttttctttatgtaatagaaaatctagagtagagtgaatggcattgacatctcacagatgtgtcagatagagtctagaatttagtccattttacgttactttaatattttatatcagaacattcacccatatataaagggggaaattcaatctagaaaaaaactgtaactttaaaataatatgcactgcaacctttcttgtactgcttcttagttgaaaccagtgagctcgtgcaatatatttttttataattcttttgacaaataacccctaacggtttatttaaatatatgtatgcgtgtgtgtatatatatatgcgtgtataatataatatatgtctctaaaatctctaaaattaacctcaattgtttagttatttacctttaggaatagttgttttaatatttttatattttattttcatattttattttatacacacacacacacacacacacacacacacacacacacacagggggagacagagacagacagacagacagagacagaaaaggtctcgcactgtcccaggctagagtgctgtggcttaatcatagctcactgcagtctcgaactcctgggctcaagtgatccttccacctcagtttcccgagtagctgggactacaggtgcttgctaccatgccccactaattttttattttttagtttttgtagagatggggttttctcgtgttgcccaagctggtcttgcacttctgggtccaagccattctcacgtcttggtctcctaaagagttgaggttacagacgtgagtcactgtgcccagccctatattttttaaagtatatgtaatcagatgacattgtctcagatatactttaattgataacgccaataactggagaatcttttcatggctcttgatctttttgtgccttagacaggtgggttcatgtctctgtatttcccagattccattttaacaatgataattcccatattacagggtacttaaaaggattaaaaataaaattggtgactgggcatggtggctcatgcctgtaatcccagcactttgggaggccgaggcaggcggatcacgaggtcaggagatcgggaccatcctggctaacatggtgaaaccccgtctctactaaaaatacaaaaaaaaaattagccagacatggtggcgggcgcctgtagtcccagctactcaggaggctgcggcaggagaatggtgtgaacccgggaggtggagtttgcagtgagctgagatcgcgccactgcactccaggctgggtgacagagcgagactccatctcaaaaaataaaataaaataaaattggtgaggtagttacatagatagggcagatttaggcactgagttgctagaagctataattagttgaaaatgcatcagctaggagagaaaagcatttaatatttgtgtagagtaagagaccacaagaatgctcagtagcatgtggaaatacttttaggaggttcagagggggaaatgagggtattatggatgtggatttgcatggacattttagttgtagaatgttctgtggaaagggtgggctggactaagccatgtgaagatctgttcttacataatctactttaatgatttctccaaatttgagaaacaactagctaccatgatacgagttcccagtatatgacactcatgacaggctttcacgtattttccctgaattttacaacataactccagggtaagtcttatacagattaaaaaactgaggtctaacaaggtcaagttatttgaaagggagcattgagtagtcagttacagggctggtgttcagcttctgactgtctggctctgcctactctgttatgccagtttgggatggaagcctccagagcaggcattctcacctctacctagcactgttggtgctttgggcccaatatgtctctgctgtggtgggcaggtctgtcttctgcactgttgggtgttgagaatattcttgtcctcattccaccagaagccagtagcattctcctaacttcctttccagttgtgaaaaccaacagtgtctctagaagttgccaaatgtaaattgtccctagttgaaaacctatggagggcttttcatccattgaagagaatctctaaaattaaccttacttgttcagttatttacctttaggaatacttgttttaatatttttcgagaccttctttctcagtgagaacagactgagtctgcagaaattgagccatggcctgttatcttcctctctaccccagctccatgtgcaggaagctctactctaagcccatgcagccaaaaagtcaggggctctgtcttcctgcacttcctaggctatggctgcagccccacccaggaggggctggccatggttcttattttccccagactcatgttgccgaagcccaattcctgacaggcttggcctagggcactaacataaagtaacttaaagtggactatattctagactctacctgggctcctgagcattgtatcccagtgagttccagccccagcagcttgtaaggcagaggtgacagtgctggaggggctacaccacaaccccatccccagtgcccacttgatgacctgagtatccctcctggtagagctggctgctgtcctgtccccagctccaatgccatactccagaggttctgcccagggtgagagacaggtcctaagtgctgagatgtctgcagccttccctacagactttgtttgaaaaatagcctggcagagttcatttctgaggatgtcgttgagaacactggagagcttggtggccaccatttcagagggcagaaacagcaacccagtcagaagcttcatggagagtcctagatccagcctatcctggagccaggagactgtgagcatgtgctaggcgctctcagaagcagctgcaatgggactcggagcaaatgtgaaaggactccctgggagataacagccctgcatgatgccagagcccactgacccaaggggcttacctacaacctctgagctggccaaatgatgcatggtcctctgtccccaaggtgagtcctacaatgctgagcttacacatgacatcacaggcctccctgtcagcctgraagatggtttttgcccaagatgatggtctcaggagtcaatggagaagacctccaagccacccatccctgactgaacacgggcaaagtcgtgaaatccctgaattgtgagaggtctctaagccacacacagccagtgatgaagcttggaagtccaactagctaagccagcctgagcaccaccttttgtcacaggatctttggggtgttgcttttccagccacaaacctctatggcccgtggagcctttgtccaagttttgcttaggcctgctgggctcattctgcctccttggcccagcaggctttgcttagcttgtgctgccggcccggatcccacgcctgccgagggtgagcccagaacagagtggcaaggtgtgtgtgagcgagcgtgggatctggccactgcacacagccaggcatgctggctgtggcagggcaggcagctccaggtgccggctctgtgtgaggctgtggccaaatcaggcgttccataagcgacttccactgygggcaccaggaaacgtggccctaggaggcttggagacgctaggaaccgcagatccccaaagaggatgtcacagccctggctcggtgagctgttaagtctgggctctctgaagagccacagatcttctctccttctcattgcttgcaataaggygaatggcagggcgtgtttctgccctgtttgtgctacagctctttcattcccaccattgagctggtctcaagttcttgtccggcatccaggaagaacaaggtatatggacaactagagggtaagcaaggcaaagaggtggtttattgagcgacagtacagctctcaggagacgctaagtgggtagctcctctccacaggcaggtggtcccgatgattgcagctctcagtggagaggagacccggagtaggtagctcctatcagcaggcaggtcgttctgttgagtgtgcagccctcagcggacaggggacctggagtgggtagcttttctccgcaggcaggttggcttgtggagtgtgcagccctcagagtagaggggacccggagtgggtagctccttcccacagctggtagtcccaatttctgtgtgagtctggccgaaactcgctttttttatgaacttagaagggaggaagcgcatgctgattggtccatgggcagccatgggcgggcctagaaaaagcactatccgattggctgtatggtcatcaatgaagtcctcacttccggcagtggacctcactgggaactggcagcccggccccgaggcttcaggttgttcctggcttgaaggtagggtttcacaggggacctgccaatttttgcccaggaacttgtgggactcccaccatcaacatgccatgtatggttcccaggctgtttgtcccaaggttgcctgcaggcctgccccgagccaccctcccgtgcttgttggcgcccaaagtctggagagggccaagccggcagagtgccaggcatgtcagcactgccctgagcacatgcatacctgccaactcggaaggggatggggatcctgccagctccatggagcatgcagccctaggcacacctccctcattgcagtcttcgcagccgccactccagaggcgccactgctgccatcacattgaccagaaagtggtttacgtggagccaggagcaacctccggaaagccaagaaaaatagaaggagacttggtggtggcatttcagcctggcgactgcagagtctgagcagggggtccgtggctgcatcctgcggggggatagatttcctagagttcagccagtgactataaaaataaacaaatgagtataacaacaaacaacccaaataagttttgtttttgattttgttttttttttttttacatttgtgtattgtagttgcaactgttcaggaagtcaactcttggttgaagtgctgaggtggagggctgagctatgtgttcttgtataatgggtttggagttagatggacctaatcatggcactcttcactcacttgggagaccttggggtactttacctctgagcctaaaatagggacagtttttccttctgtctcacaggacatcagatattgcagataggccatgactggcacytcataagtagatgcttagtaaatgtcagtaaccttcccctttttgggggagaaagaagtgacttcccagtagacatgtataactccatacattttttgaagaaggggtagctgtgggcaagtctggagtacagtatggaataaattccattactccttccttaattaggagtgctatgtctgtttctcccctgacagtctttgggaggtattttctcaatgagccaagcacccagtgtgtgcttgtattaaatctcttccatgcctcattcttctccttgccacattatccctgtccttctctcttctcctctccagcccccattgttctctctgatcttggtcctttggcctttgaggttcgtgacagaaaagagcatcatgcttgcagaggcagcatatttgtggaggcagcgtcctgcctcgttgaggagactttgagaagacctgatacaggctgttgttggtcatctacttcctgtacagtggaggcatttttctatgacgggtccctcaagggcttccaccctgtctctggaatgggactttccgtatcttccaagtggtgaacagtgagttttcttggtgatttctgaggctgggctatttgtatggtcaaccccataccattaatagnnnnnnnnnnnnnnnnnnnnnnnnnnnnnnnnnnnnnnnnnnnnnnnnnnnnnnnnnnnnnnnnnnnnnnnnnnnnnnnnnnnnnnnnnnnnnnnnnnnnnnnnnnnnnnnnnnnnnnnnnnnnnnnnnnnnnnnnnnnnnnnnnnnnnnnnnnnnnnnnnnnnnnnnnnnnnnnnnnnnnnnnnnnnnnnnnnnnnnnnnnnnnnnnnnnnaccccataccattgataggtccttctagaacctcttattttctctttcacatttggttgtctgtctttacttgttatactgtcacctaacactgttaaggtcagtaggaaacttggtagctagagtaatgctttcagtatagtaggtgttcagtaaatattggtgaaatatgtgggagcttgctgtgtgtcacctgtgttgaggaagagcctggctggactgtgtgaaagccgtgagtcttcacacagagtttctggactcagcgttcccacggagtgtttttggacatttcctgtaaaatcttcataaagtctccatttgctttcttcaagataaaagtaaaccttttcttaacataccttttcttaaccattatttagttatacatttgttaattatgaatacttaatagtattagtttaaccattttgaattattttgaccattataccgtagtatttcagctgctttatgcattaggtgatctttatcagactttattagatatataaaagtttagtcatttctgtgggaagaatggttcctgaatgctgaatggcttagaaatgaccacaatcagaagtttcaggctgtttactacatggctgtcacctctaagcagtgaggagctttgaaaggctgtttacctattttttcattttaacagtaaattacaaagttatcttacgacttccagcaaagttacaaaattaccttacgactccccaatacttaaagccatactgtcattactgttactgtgtaagacccttgtctttaatgcttccgttttgctgcggtgatcacttgcaagctgactgagctcagactgtctcttgctctggagagggaaaggccaggagctctgttctggctgaccttggctgccaaggtagggaggagctgcagccggccggtaactttcattcaccggctctgtccgatgagcacaagctcatgtcaggcactccccagagccacactgggcctgggtggcatcgattcctagtgtgattctgaatgaaattgatgaatgggagcacacagtgataaacaggatggggaactctcctagaatggcagtgggagccaagaacaattgagatgagtctcctcctctgtaggtgttgaaatagttacagtgtgcttcctgtagtgcaatatttagaggttaagtccagttacttgcattatttatctctttactgcaaacaccaaatgtttgagtcacacttttaggttggccttttcattatttaatctaaatgtgttttaaaaacagatttttaatctctgggtttataatatgatttttatgccattctgtagactttgtttgggaaagcatcttaatatattttttaggtttctggaatcaaattgtatattgtgttggaattgttgtttctgagtttaaacatttccatcagttgctggaaaggctggtgtgtgaaagcccccttctggtccagtgcagtgtcagaggtctctctcctgcatgtcagattagttcgtctgctgagctacttgattataagcattcgccagtataatactgagttctgaaaactagaccctacctgattgtgacgccaaatttattcagtttattaagttgtaggcactaaaacacatagtacttattgcctgaatcttgctttcaaaacttggaggaaaaaccattttcttccctggtttcttgtttttgccttggctgtgctgtgcagctttacatggtatgcttcagaatcttcgtagattttcttaagttgtacctgaaagattctttgctaatgagcatattttgtttagtctaattgatgccaccttccccctatagtgttaagtaacttttttacttaaaaacagaattaaaattcaagatttgaaagtatatttgaaatatttggaacttgatagagcttttttattaaaaacctatttttaaaaatctagatattatttaaatctgattgttgcttcagtaccattgtagtatattagcactgttgaaattttgttcatttccaaaatttaagactgttcatgtttgagaaagggtgttatgaagcaattcactcgtgaaatatgaatatttttatactagtatagttgagttatatagatacatattaataggaaagatagattgcagttctattagcaamctaaattgagagctttaatttgctatttaaaacttattcctagagtgaacaacaccttttttaaaaatacattttatattgacataattaatgactcctgggaagttgcaaaggtagtacagggagaccccgtgtgtcccttcaccgagattccttcagtggttgacaacttacctgtagtagaatatcagaccaggatgttgacactggtacagtgtgtgcgcgtaaggctgtgttatttcatcttgagtgtgggttcctgtcaccaccaacgcagtcaaggtgcagaactgttgcaccaccgtgaggatctccctcacactagcccagtgggctcagccatccctctgcttccagcagccctcaccctgggtaaccttgaatttgtcttcatttctataaatttgtcatttctggagtgttatataaatgaaataaaccattcatgaccttcggagactcgtttttttttttttgtttgtttgtttgtttagatggagtcttgctctgtcacccaggctggagtgctatggcgcgatctcagctcactgcaatttccgcctcctgggttcaagcaattctcctgcctcagcctcctgagtagctgggattacaggcacacaccaccatacccggctaatttttgtatttttggtagagacggggtttcaccatgctgttcaggctggtctcgagctcctgacctcatgatccgcccacctcaaactcctgaccttgcgatctgccttggcctcccaaggtgctgtgattacaggcctagccaccgtgccccgcccttgcgatccgccttggcctcccaaggtgctgtgattacaggcgtagccaccgtgccccgcccttscgatccgccttggcctcccaaggtgctgtgattacaggcgtagccaccgtgccccgcccttccgatccgccttggcctcccaaggtgctgtgattacaggcgtgagccaccgtgccccgcccttgcgatccgccttggcctcccaaggtgctgtgattacaggcgtagccaccgtgcgccgaccttgcgatccgccttggcctcccaaggtgctgtgattacaggcgtagccaccgtgcccgcctagagactttttctgcttagcacaacaccctggagatccatccaagttgttgtatatgtcaatagtttgttcmttttttactgctaactaggatttcatggatggatgtaccacagcatattttaaaccattcatcattgttggttgaagttttttgttgtttacaggtttttgttataaataaaactgctttgaacaattatgtacagcttttttgtggacataagtttttatttctccagatcgatgtccaggagtgaggttgctgatttttatggtcattctatgcttattttaagactgacaaactcttttccagagttacagttttgttttacattcccaccagcaatgcctgggacatctagttttgccacatttggccgatgtttgatggaagyggtgcttcctcgtggtttgcgtgtgccgttccgttatggctggcgacgttgagcacgttcttgctgcatgtttgccatcctcaggactctagtaaagtgtcttttcatgtcttttgcccattttctaattggatttattttaaactattgatattgagagttctttatatattctacataggagtcctttgtcagatatgtggcttacaaatattttgtactagtttgtagtttgtcttttcatcttctgcaaggatctttacatattcaaagtatttaattttatcaaagtccaattgatttttttttaatgggttgttcctttgatgtcctgtttaggaactcatcttccagccctgtgccctgaggatttcttcttgtggtggttttttttttttgtcctaaaagttttacattgagatctgtggtctgttgtgagttaattactgtataagatgtaaggttcaggtcaaggctttgggttgttgggctatgtatgtccaaatgctctagcgtcatttatagtgaagactccattctccataaattgcttttgtaaatgcatcaaaagtagttgccatacttgtatgttggggggactctctctgggttctttattttgttccattgatctgtgtttctgttccttcttcagtatcaaacaatcttgattactgcagccatctggtaagtcttaaaatctggtgggctgatttctcccattttttcttcctttttcccccacattgttttagccattctaaacaacttttagctgttttaaacaactttacctttctatacacattttagaataatcttgcctatatctttaaagaaagtcttcatgggacaatgatagtcatgaagtctgcacctgttggcatttatgggtggccgggttcttcatttgctagtctgagataaaaagggcaagatgaaaacaggaaatcaccactgtcctttcttgatacccgaggaattgagctggactgcacttttcctcctcttgtagaatcatcatcatttttaaaaatttaatgttcagcattttttgctttatttaggaagaataagaaagagtacatctgctctatctttctggaagtaaacttcccttaaaggttttattcattttctgttttttaaattggatcttaaactttattctaggaattttcactgcatgaagctatagtgtaatggactgctgcrtcaccatcgtcccctggaagactgctcattaaatggccagtcttgcttcatccgtatgtctcatttggatgaaatcctgtgtataatttgattgcattaacaaattcagcatttacagattacaaccacaattccattatcataccataaactattgaacagggatttcttagattaacgcttggtgagtctcctggtttctgattgtctcacacacttcttacagttgatctgttccagtcaggatgcgagggcccttctcttgcgcttggtacaggtgtctctcaaatctgttttcttctaaaacaattccttctctttctttgttttttatttgttgaaaaaacagggttattggacatagagaatatctgatattctagattgtgtgagtgcatacacaaaacaaccatgttattaattaatacattcctttatatcctgtatttttgttaactggtaggtggatctaaagggttgatcatactcatttttggttttcttttagcttttcatttttttggttaaagaatactatagcaatgctcctgtatagtcctgtttctaactccaggcagatgtctacatgtctctcttttagtgatgaataaatacaggtgctatcaactgatcttcccagtgtaaagttcttcatcaggccaggcgtggtggctcacacctgtaatcccagcactttgggaggctgaggtgggtggatcatgaggtcaagagatcgagaccatcctggccaacatggtgaaaccctgtctctactaaaaatacaaaaaaattagctgggcatggtggcacgcatctgtagtcccagctactcggaaggctgaggcaggagaattgcttgaacctgggaggtggaggttgcagtgagccgcgattgtgccactgcactccagcctggcgacagagcgagactgtctcaaaaaaaaaaaaaaaagaaaaaaaaaaacatcaaaacttttgaaacctcaaaagtcacctggatgaattctctctgtgattaaactgaattatgttttatacgctgctttttattttttaggagttttttaaaagtttggtgtaatttggctttttaattatataaaatgtatctggttttaaagtgaacagtataagatatattcaaaaggcctagcatctattcctgttcccttcctgcctctataggtattatacacacatacatgcgtacacagatatatgtgcacacacacagaagcatttgcatgcatacagatacactcacacacagaggcacacacatagaaacacagatttgcatgccctcacatctgtcacacagatatgcatgcatgcgtacataggtacacttgtgtgcacacagatatgttcacacaccaatatgcacacacacagaaacacacagatcctcaggtacttgttcacagttatacatgcatattatacacagatacccatgtacacaaacatacacacaagcacacacaaatacatatgtacacatgcatgtgcacacacagatacgcttgtgcacacacagcacacacaagttagccatgcacgcgcacacacatatacatgcacacacacagatacacacatagatacatatccacacacagatgaacatgcatgtatacagttatatatgcatagagatctgtatggacgtatacaaattctctctcctccctcccttgttcttaactataatgtatttttctatatataatgtcctgcaccttactttctttatttcacaatctatatcctagagatctttccatgacagtgtattgaggtcatcttgtttgctttactttcttctctctgtattgccgtatgtgctctgttttattcagctcgtcctctgtttgttcccctttgtttcacaacagtcttctgttattataaataatgctgcaaggagcagccttgtgtgtatgtcattttgtgcttttgctattccatcattagaatagattctgagaagtgggatgatagcacggccaaagagtagtggattttcataatagaatatcttagcatgtttgaaactggataggcctgagagcatatggtaacatttacctgggtcttagcattgtagctgtgcttttatgattgaacattttttatgacggtaaatctggtattttattagcaaaataatactatacactgttggatatttttgtgtatttgttattttgttattatcaaaacatacattgaaagtagaaatgatcaatgcagtttttctaaaatagaaggctgattaatgttaaaccttaataggcaagaacagcaaataggaaataagtgatttaaaaaaatataatggcctacatcttttcatgaaacctgttttgtgaatcaaggaacattgtgtaaaataaaagtttttaaggagttttgttcctgggaatatctagattgttatttctttgtcctactgtgccctggaattattctttgatggcacctgtagctcaggaaaaaccttctgtaacaattcaagagtggtaaatttttattctctacttccaaggttcgtgttttattcgaactgatcaactagatggtgaaactgactggaagctgaaggtggcagtgagctgcacgcaacagctgccggctctgggggtgagcagcaccaagactactccatccttttatcttcaatggtagtttctaggcttcacgtatatttctgtttataccagctaatttatttaatgcattgagaatttgttttataatttctttattcctcatgaaggttcattgaagaattgtgccaaaataatttctgtgatgtcttagcacataatcagttttaggtaattgtgaattttctttgacacttaggttttctttctccttctgctcaccttcctgcccttcctccctstccttgcccccttccccctcttccgcctcctcctcctcttaatgtccttttcctttttcaatttattttattttttaagtgataggttgtcactctgttgcccagactgaaatacagtaacatgatcatagctcactgcagcctcaaacgcctgggctcaagtgatgctctctccacagtctcctgagtagatgggagtacaggtgcacaccaccacgcccagccagttcttaatttttttttttttgtagagatgggggtcttgctatgttgcccaggctggtcttgaactcctggtctcaagcagtcctctcwccttggtctttcaaagtgctgggattacaggtttgagccaccatgcccagtgataaattttkatttcttatttggctgtgtgctcctctcctttgcgactttgtattgatatttgccaattaaaaagtacatacatgctcgtgwgtgtagaatctttcaaatcagtaaaaccagatattcacaaatgaatatctgtttttaattttcahttaggcacataaaagtgtttttctttcttctattttctctctgtacctcacatggacttcattagccttcaggtcagaagctctatttgaaaattgtccaagctgcttctctgggtcaggcttctcagtcaaagccaggcagtgaagtgctgctcagatgatttgttttcatgggtttttaattttcagtgttctatgattgtttacttaaattatctaggatactatgcataatttatatgtttagagttattacaacttaacatttttccgtggtcagtgaatgaaggaaggtaggttctactggaccaacagatgagcagattggagaggttgggcagttgacagctgccttttacctgcttggtggtgggtagagtcaaccaggcagctattaaatagtgaagttatatgtcagggagcagcacctcctcacctgaggatggggctggggtgtgtgtgcatgyggcagttcctggatcacacagtgtggctttcaaaggagctgccaaactgttttccagagtggctgtgccattccctgtcctcaccagcaccggatgagtgacccggtttctctgtgtccttgccgccttcaatgttgtcaccagtttttattgtagtcattctgacgggtgtgcagtgatatcttatcgtggcttcagtttgcgtttctgtgatggccggttgtgttgaacgttgttttgtgtgcttgtttgccatctgcttgtcctctttggtgatgtgtcctgttgacagtctcggagcaaaagcattccgccttgatgtataatgctagctgcagcttgttcagggagtctctgtcagggtgaggaagttctttctagtcttagtttgctgagaggttttatcatgaatgggtgttagatttttccaaagcttttctgtatctgtagggatgatcatatggattttctcctttatctattaatatgatggtatgtggactgatttcatatgtgttacaccagccttgtattactggcataaacctcacctagtagtcatactgcatgtctttttattatgtcacggtatttgatatgctgatattttgttaaggatgttttgtgctgatgttcatgaaacatatggatctgtattgcttttgtttaatgtctttagtttgatatctgggggtaggctggccttataatgagttggggagtctttttgcctcctgtaatttttaaaatagttggcataaaattggcgttatttattttttaaatgttgaacaaattcacttttggaactatctgatccaagagattactttttgggaaaacacttgattgtgaattgaatttctttggtatagagttaatcagattttctcttcattggaaatttgtgtttttcagagaattggttcatttcacgtaagttgacaacattaatggcataaagttcataatattccattatttttttagccattttaggattccttctttcactcccaatattggtagtttatatcctgtctcttttatcgatcatttcaaagaacttgtttttggtttcattgattatcttcattgtttgttcattttctgtgttattaatttctgctctttatttccttcattctacatagtttataattttttttgtttcttcctccttaaggtggaagttagacctttgattttataacttattattttctatttataaactttcagagctgtaaacctgtttccaagcattgtttacctgtgtcacacaaattttgatttatttagttaaaaataattaataatttagttaaaaaatcattttcatttagttaaaaatattttctaattccttcatgattcttcttttcatccttgattatttggaaatacactgttatttgctaaacagttggggattttcccaatgtctggtaatttattgttatttaattctcttatggtcatagaacatattctgttctatttcagtcctttcatatgtattgaaacttgtgatatggcccagcatatgaactctctgggtcagtattccatgtaagctttaaaataatgtttgttctgctattgcctggatgttctgtaaatgttcattaggtcaagctaatggaaagtgttgtttaaaaaagttttatagttgttttctaccattcgttctctgaattactgaagaagacttttaagatcccataccttttgtagatggaactatttctccttttggctctgttacctgtttcctgatctatattgaagcactgttactgggttcatacactttcagaattactatattttgttgaatttgccctttcattattcctggtaatattctttgttgagacatctattttgttctttactattatagtaatttcagctttttttaaattagtatttacatggtttatcttccattagtgtgtgttttatatatctttttctttgaatttaaagtgttttttaatgtaataaaagtaggtactgctttttttattctgagaattgctgcatttttattgtgtacatttacrgtaatcgttaatgtggttgagcggaagtcagtcatttgactctgtaggttctacttatcccatttgtttcttttcttcatcttttggtgttgtgttatatttccatttggctaattagctatgtacgttagttctgttttgtgtcattatcatgtttccaatgggtgtttttaacttaccgcaatatttctccatgtcacttacagtgtaagagttgtgcacagtagatgcccatggcttccttcccatcctttgtattcatgtcagctgtcgtacttctacatattatcagctgcaccgtgcattactgtttttttttgttcaaagttgtcaagcatattttaaagatagtaaaaaatgaaaacagtcttttctgtttacccatgtgtttgtttacctgttctgagacttctctttcctgtgtgttgatccaggtttccatttactgccaatttcctttagccctaagaacttctttcaacgtatcttgtagtgaaatctgctagagattgtcagtttttgtttgtttgaaaattgtctttattttgcctttttcttttctcatttttttttttgagacagagtctcgctctgtcacagaggcttaagtgcagtagtgcaatctcgactcactgcagtctccacctcctgggtttaagcaattctcctgtctcagctcctaggtagctgggattacaggcatgtgccaccaccacgcccggctaatttttgtttttttgttttttttttttttaagtggagacggggtttcaccatgttggccaagctggtcttgaactcctgacctcagatgatccgcccaccttggcctcccaaagtgggggattaagggtgtgagccatcacgctgggcctattttgccttcacttttgaaggatgtcttgaagttttcatttatctttgcctttcagagctttgatttcatctgatggcatccatagtcctgaaaagatgcttacaggcattcttaccctgactccactttatcctctgtgcctttttctgtgggcgtttggaaagtctttcctgttttgactggctttcaggaatttaagtgtgttgatgcattttcatttgtcttgcttgggtttgttgggcttcttgtatctggagtttcatggtttttatccagtttcaagattttcagcctttatttttcttatctttccttctgtccaaacccctctgagacatgaccaacagaattagtctaactactaatatcaagtaaattagtctaactactcatattaaaaaagagtaagaacttcaatgacatgggaatatcaagtggttagattcccacatgccattgatgctctcttactcttctttttctcagccttttttttccttctgtaactcaattttgatagtatctgttgctctgtcattaaattcactaacatttatctttttcagtatctagtcttctgttaagcccacccaatgaattttgttattctgagtgttgtaatctctggatgtttcatacgtttctctcatttttgttgtttaaataccttttctattctttcctaatatgtatatggcttcattggactatttcaacggtttgtaatgcttaattccatgtatgttaaaactcctttatctctgtcacttttgggtatgtttctatttaaattttttggccctcgttataggcccatactttcctgcttctttccgtgtctggtaattttttattgtatgctgagtatataagtgttacatttaatgtctgagattttcatttctatctttaaagcatctcgatctttattaaattagttaaacaacttgtgggtcaacttgatgtcttcaaggcttgtccttaaactttgttacaggcctagaggctcctttattggaatgctaattaatcctgttgctagagcatgatcctgctgggatcctgctgatgtctactgaaatccttgctggttcacaggtgcctctgaactctggctagtcaaaactcagctctccaactctgtggtctctgcaggtggttggggctggagctccgtggttctcctccggccggacatactcttaccctgtatgctgtgtgtactcactttcagtaacactcaggtggaacactttgcatatttctgcaattctgtttcttccttgcctcttttcagtattttgcaaatgctagctgtcagtttccttgaattctggtctcagtctcctaaattcagaacagctgcctccctctgcctggcttctgctgtctaaagtggtaaatctctttacctgggcttatgtggggcacatggctttgtttctcctctccctggggcactgtatctagtgtctgaaaatagatactttataaatattgtccattttccagttgttttcatgggaggacaagtctcatattagttaccacaacatgacttgtagaagcccttgattaatttttaatgaaaaatattaagttccttgtggatgaaacaaactgcatgacatttcaaattataattaaactaaaacaaacagttatttgtttattgagaatttgcttgttggtagggatctacctgctgggaggcctgtgactgccctgcagagcctggatgccggcccttctgccacctttagatgttcctgccctctcttcaggggcattcctttaaaaaagaagtggatgtcaattttgagtcctgattctaatagtaatgtgtgcattgaaaataatacacaaatcacaaaatagaaaaaaacctgccagtctgcattggccatcagagcattttggtataaatcctttctgacagtaccttcccctagccacattcttgcatggttggataatgctgtatattactgtttttactagtagaatatttattcaacaatatgctatgggtcatcctttcatgttaggaattgtgtatccttgcaagtgttttattagctgcatagtttctgacaaattatagcttccatagctgacctgatattggtaaatttaaaagwtatcattttgaaattctagatttaaaaaaaagcatatttcaagaattttgattatttggccaaaatgcttttcagaagactatgcaacttatctactgtgtattaattaatcaattaatctttcactgttttccaatctgataactgtaacaatggtatcccatttaaatttacatttgtttagttttttaatgtgtgagattgaagataattcttacctaagaaaatgtatttctcatatttttattttctaagtctgttcatgttatctgctaaagtttgttaataattttttattttccaatgtttctaaatacttcgtttatagtttctgttgcccatataaaagttcagtgtatttagataatgtgacctaccaatatttttttcaatgatttctgctttttggttttatgctttgactatttctactcatgattatattttaaataattagttttaaaataattcctgctttccatacaaaatctgattatctaccatttttggggggagtattttttttttagtttaaagttaaaaaaaaaaaaagaaaaacagtaagttgcaccagtaccattcactgaagaacttttttgttagatttttatttttgcacaaatttaatattgwccccatatgtttatacaattctaatttctcaacatcagggtatcagcgtatctgtttctccataactttacccagtacacattgcaaatatattctccaatctgtttcttaacttctggccttataatatcttcgctatgtaaatatttcaaattttatttaggtaaatatttatatgttttcttttattgtttatatgtttttctttatgcatttataggctttgtcttgtaccaggaggctgtttgcccaccagtattcatttatcattttaaccacttttaaatgtttgtcagtaggtggaatcgaaaagtgagagccaagtaatttgcatttacactattataattattaaaatagttcctatagttccagctgatgcacaaagacctagcagagggaagttgaatctttcacttagtatgtgtggctaaagaattgtttgagagttaaggttaagtaggtttttttgtttgtttgtttgtttttttaatttcatgttatgagctgagcagaatcgtgcgtcactccagcctgcatcttctgtgtcatcatttccctcctcagccctttctcatcctcgctctgcttcccagggttttcgacttgcttttggtttttttttatgttgtgaaataagtctgttctattatcttattacttgacatctagcttattgttctcatactatttattaaggtaagttttatcatagagacattcttgcagcctattgactttctaatgtaattggaactgattgctgggttagtgctactgtttcatggttacatatttcctccttgtgtccttctttttcttgtgtacatactcaagtaatctctgcagaactaaagggataatatgagtccttaaatgactggaggggattttggttggctgtaacacttggacaaaagccccaccctctgcatcctcctcctgaagaaccttccaagaattctagggtccctggcagtaagcagcttgggagcaagtcacactaaatgataattttctaacagatttaattttgctaagtgtagtagaaaagaaagtacagaatcaaaacactatattagaaaaaatttgtctgaaaaaaaaaaacccaaaaaatccagccaagcaaggatgtcggtacatgtttccattaacatacaattctgtacaagcgatcagcaggtgacagaggttagcagtgcagggataggcgggttgcatgggggcacggggatacttttgtgagtaatgaaaatgttcagtatcttgaggtggtggtggtcacaggcatacacatatatcaaaacaaaatggtacactttaaacgtgcagttattgcatggaaatcacaccttatgaagtagttacagattttcatactgttatctataactttgagtaatgctctttgccatgattataggaagtgacattttattatcttcaatattataaggatactttctttatttttattagtgacagatatatacacatataaattcaaaaatatgtacagaattaaaataaataattcgtacaatgcaactttaacattttcgtggccagtacactttgatacagagtctgattaaggattttagtgacataactatatggtaaatgaaaacattttaatttttgctgttaccacaccaccaaaaagcagtatatcctaggaaaaaaggaagttcaactgaatatctgattcattaatcaattttatattttagcttcacataacttggcatattaggtatagatcttttttctatagagaagaaagctctgatttcattatggatatgggcaaggcaattgagtttttcatgtaatagcttatgcccgtaatcatccctcattctgacattcgtgtctctcgtggtgtagatctgagggtcttctgtgttgtgagctgtttgttgtatcacagttgtgtcacatcagactgtgtccatggtgacagccaggctgagtaaacttagagacctaagaactcatctggaagagctgaggacacagccaagaataacctttgtccattctgttatattctcagagaattaaaatttcagagtcatgtaataataactgtgctgcagagcctgtaatggcaggtgcagtttcttgtggcttcatagctgtctggaggcacagttttcaggcgttgtagacatttgggaaatatgtttctggcttttgtgatcaaacaaatttattaacaaccacaaggccacagtaaytttcaataaatcatgacatgctgatttatttcaaaagatccgtatagcagtaaacaataccatttacatttaattagttttattgaacgaaaggcaattttatttgtaatgaaccacatgttatgattaaggatgtattttaatgacctttaagtaatgcgaacaagtgttggccttgacctcacagcagaggctttcctccgttattgaaaacttcagaatgatttttaaattatcgtgaaaagcttcgaatgacattctcattattgtgccatttattcagtcatttgatgtctactatactagatgaaatgcattactctaaatgctgatgtgtgtgtagaaatgagcttgccagcctgttttttattttcatgtatcaaaaagtagtttgaggtatgaaagtttcatgttttgaaaattactgtgacagtgtcatatttaaatgatgagtgattctcagacttgccttatccctggaatcacttgactgcttattaaacattctagtagaagtttcataattctcaagttactagagaatatttcttttcatgtaaactagcttaatttaaataaatttttgctattaatagtacatagtctaagctactataacagttgcactgtggtaaactagtatgttcaaccttcagtccacccttcctgcagcctctgttctttagaaatttggaaactagcctgcacgtatttttcacagtttcttgaaaggtgtgtgaatttgctttcacattgaatgtactttcacagagcttgtaaggcaggagtgaggaggaggtatctttttgcctgtgtgttctctgctgacaggtgtcctcatgggtctgagttcctgctcccgctctccagctttagggcttgggtgggagtgcactatgtgcatggtggtctccaaaccacgtgtctcagatgtgatccttgccatagtgctttccttggatggatattttggtaacattctgagagtagctttggagcttcagtcctgaacttcatcctttcactgatttgggaagcatcttgttctgtgtatgaaatcactttctgctacactgtctagggtggcttctgtttcctgtactgaaatgtgactgacgcaccttaaatcaaaacagattttcaccctcacagtagcccaggtgggtggtcaaagggtgatagggcaactttgtcatctctgatacgtgggttccagtgactgccccacytccacactgtcccacaggggaggttcggaaggaaaggcctggtgagtacttggactcaaaggggcacatgtcctttcgcatgctctgctggccagaatcagttacctggtcctaaccagctgcaaagaatgctgagaaatgcattctttaagtgagaaccacctacacatctacagctccgaagttctatttttcaaaggaaatgggaagaaatatggaaggtggtctctgccgagccatttcttcattttgtttcccrttgagtgtctgattccccctgtgctgctgctgaatggagtgcacaaaaccattccagcagttctcagaggactgtgctgccctgagaacaggatgctccctttagcattgctgttataattccctgtttcattagcatcagttgtttcccatgcattcttcaaggaactcagagcaatttacaaatttgtatggtaatgactcacatagattaaaatagaaaaatgaatgaaatatcaacagaaaaatagtaaatatgtcttctagaaatgaaatatgccatatcaattttaggtgatcgaatcttctctgttaaagattttttttttaagtgattgagcatgacttacaactctccagtccctttaagaagagatctggcaggcaagagtcctgtgtagaaaacatgaggacgccctttagctgtgctaccccttttctgaaaggattattggaatgcgtgtgtagaatcaacaggaaagagaaagcccggtgcaaatgtaaaagcccagcccagaggaagtaggtgttccaggaacagaaaagaataaattcagatgtctratgtacttgaagaaatatgagaggatgttactaacaacctaaataaaacaagctatgaaaaaggatcatgtggaaaataagagctcttagaaatatatatggttgctgaaattttaaaaaagtaaataagagtggaaaatgaattgttctacgtccctcagaatacaggccaaggttgggaaatacaaattgatggttaccagttttagctcggccctcggtgctccctgtaatccttgttagaagttataatcaactgtggttcctcttactgatgacagtgctttcagacttttccactctcctttgatttctgatccacctgtcttttccttcaccggtaagaccagtttgtcttaccttacatggaaaaagcattctatcaaatggaaattccttcaatatcccattaataaataaagaacattacctctattctcccattttgctataattgcaataaagaatccttctaagaataattattttatagttttcaactgagcttatcaaattgtgctttttagagaccttggtagatgagtagtttcttctctctttttctaatctttctctgttggtttctttctgttatctcttaaggccttcaagtgtacctcggcttctcaagtcttcctttagatctttcttcaattttactgtaattgaatatttttagaatactattttatctcttggctttttagcattttttttttttttagtttgcagtattctgttaactaaaatatgcctttaactagagttttttaactagttacagtatgcctttaactagagtttgcaatatgcctttaactaaaagtgtattgtgaaaagtaaaaattgtaccatttcacataaaatacaagaattttgtccttgaggccaggcamggtggatcacgcctgtaatcccagcactttgggaggctgaggcaggtggatcacaaggtcaggagttcaagaccagtctgaccaatatggtaaaaccccatctctaataaaaatataaaaatcatccgggygtggtggtgtgcacctgtaatcccagctattcaggagactgaggccagagaatcrcttgaacctgggaggcggaggttgcagtgagccgagatcttgccgctgcactccagcctgggcgacagagcgagactccatcaaaaaaaaaagataattttgtccttgaatagacctgtttcccccacccaccctttgtactatacattccccttgaacaacacaggggtcaattgtatcaatcccccacgcagtcaaacatttatgtgtaaacttttaactccccccaaatttaactgttaatagcctactgttcactggaaaccttgccgataacctaaacagttgattaacacatattttgggatgtcatatgnnnnnnnnnnnnnnnnnnnntattttggatgtcatatgtattatatactgtgtccttacaataaggtaagctagagaaaaattattaagaaaatcatacggaagagaaaatacacttatatagtacagtactgtattttttgatagcacaagtttgacatcacctgtttacaaggtgaactgtctgtctgaaatggtgggcagccacagctgcagactttaatccaccacacatacttagcagctcagttttttcttgtagtgtgatgacttttgtctactttttgagaacatttccagcatcactagaagcacttcttattggtcccgtggtattattcaaggttcacgccatggtattacgccaaacacgatggaaaacatgtgagcaccatgagcgagcactcggaactgtgatgcacagggtcctggagcggagacggctcacacagaggtcagtggtgccgcaccgcatttccagcagacccttgcacgcactccccgcagcarcagcaggaggggctgcgacacgattccgggagcacagtgtgtactgcacttagttctgtgcagttagggtttgatactgcatcttcaggatcattwgcaagtcactcggctgcagatggtgtcatgacctgtgtgtttaggttttattttaactttttgtaatagatttgtgtatattttattgtagtaagtgatataatagactatgtctacatacattttatgttctcatgttatacctaactttaaacatttaaaaaaaaattctagggtatgtggtgtatcttcaaggtttttcaaattatcaacaaatctycaaaagttttctaacagatttattgaagaaaattcatgtataagtggacctgcacagttccaacccatgttgctcaggagctcaatgtactttttaatatgtagtatatctacacatatcataaactgttccagccctttttatttatacacacacacacacacacacacacacacacacmtatacatatatttttggcacagagttttgctctgtcacccaggctggagtgcagtggtgcgatctcggctcactgcaacctctgcctcccgggttcaaccagttttctcctgctttaggctcgtgaatagctgggactacagacgtgcagcagcttgtgtggttaatttttgtatttttagtagagacggagtttctccatgagggccaggctgctctcaaactcctggcctcatgtgatccacctgccacggcctcccaaagtgctgggattacaggcatgagccaccgtgcctggcccattttatttatattttaaaggaattaagattaaaaacaggatttggggkttttttttaaatatttacttagatatttactacttttgttccttaccattccttcttgaagatatgagtttctgcctgatattgtttccctctgctgatattcctctggtggatgtctgctggaatggagttctcattttatttatttgacagtgtctttatttcacctgtattcttaaagaatatttttgctggatattgaattctggcttgacaagtctgccttccacaccctccacccctcactttaaatattttgttccattgtcttctgactccattatttataatgaraaatcagtggtattttgatagttcttctcttgtgtataatgtgttatttttctttaggtatttttgagattttttttatttttggtttttagcaatttgattttgatatttttaaattttatttatgtgtttaggggttttctggacatcctgaatctgtacatttctggctgacagtaaatttggcatatttttagtcattatttcttcaagtagtttttgttttttcatcctctctctgtccactcattctgaaccccagttacatgcatgttagactccgcgatattcccttcatggttctatgactgtattcatgttcaaaataattttttcctgtgtctttttgaatcattatctcttgacccgcatttagattcaccatcatctgtaatctgttaatcccatctaaagaatttattgcagacattgcattttttcaattttggaatttccatgtgcttctctgttcttaaatacactttctctttctttgttgtgatttcctacttgcttactcgttaggagcatgtttttctttaagatgtgctaaagctgctttgaaattctcatttcttaatgctgaagtttgaccatctcagggccagtcttcactgatcatgttctttcttgattatggaccttgtgtttttgtttcttcatatgtttagaaatttggatcatctcttcatttttttaaatgattcattgtagagaggcaggattcaggattctgttaggttctcctgaagagtactggttttttgtttggttctgttttaactggtagctaacttgactgaagtcaaactgcagactctacctttctggcattagggagctgctgtggtgttctcggttccattcgtttagtggatatagtttagggcatgataggttaggtgtcagaatgagatcatacacagattcggccccttctgaggcactctcctttctgagcttccatttctttctcactttgcagctgctgtggtcaccctaatctctcacctctgcttcttcatgtctgggagtctgggaggtttctgtttgagttttagcagccatgacagaactttatacactcacacgtacagaatggaaatcaaaattatagaaatggcaaactctgtgtgttaaagggtcatgggttggggggcgggtcacaagaccacccgaaattagatggtttattaggaggactcccaggactcagcatatgatcctccccctggctgtgatttatgacagcaaaagcatacagcagagtcagcagcgagaagaggcactggggtggcgtccattggagaccaggctcagccttgcctctggagactttctgatttaacctttatgtgtagccaatgaatgaagcaacctaaaccctatgtcttttctgctctaaaattaatggtatgaaagtagccatgatgtgtgtttcgtgaaagctttcccatgtgattgtataagtatgtgtcatgagcatgtgattcagacacacaggacaagcatgtcttcatggctgtaaggaaggccacccttagcttatagtgaccagtgcctgcttgaatgaaagcatgtaaacagatctaggaatttattaaactgttttataaaacttgtgaggaattgcgatggttccttatttccccctgaatactttgatacccaggtgacttcaagatactcctaaacaggctccacctctaccattggagccccctggacaggccccggggctgcctgttttgagtgtctcctgcatgattttgactcacacctgctgttcaaaagcacaccctgtcaagcttaaaaatggtttctttctttatctgacattctaatttatagtgttggcacacaaaaatctaagaaaatcaatgattgcttttggtaaataatatatgaacaatattaatcagcaaatgagaaatttccaagtaattttactaaactataacattctaatcgattcaaatgttctgtattccaggaccttttttctatcagtgcttatgtttatgctcagaaaccacaaatggacattcacagtttcgaaggcacatttaccagggtaagttaaacctgttgttcaatacaaatagagttattgtgtaagttaaaagtagcaaacctttgagacagtaattcaatcaagaataaattcaaacagaagtttcaaactaggaagggaaaacctatataatgtttgaagttcttaagtgtacccatattaaatatgtctttgggatacatttagtacagtttttggaattttttttagcatatttactaataagatctttatctcctaaaatattgtgaatcagttaaatgaagtaatttattttcattctgactgaatagttggtatactatcttatccacatcatgtctagctttttactgtctgagttgggtgggtatttatatatatgtgagtctgtacatgcatgttgtgtttctttatacacatatgtatatttcatgccacacactttatattattacagagttttgttaaagctggaagcaccttgcccctgactaacagggcttgagagactcaataactctttattttaacagcttataactgatattataaatgctttatagtaagggattttagtacatgactataggttatttgtaattgctgcagttattttaaaaatacttttgttggtgaattcacctttatttcactcttggtcacttgcagggattggcaagcagttgtcatcacttgaaaaagcatttacagagcttatataatgtgacagttagtgtgcagactatgggaatgtgaagcacgggcacctgtgaggtcgttaaagtcccttggggcactgggccttttgtagctgcctatttccataggtgctgcacacaagcatgcataagatgttcatggagggacagaggaggaagcatgacctggtgataaatatcatggagtgaattctgaaataaactcacatcttttttttttaaacaaaagtagttactatgaaaacaacatgttcttattaaagacaacatatgagaataaatgttacaaaaaggtacccttggtaagataaatgaaaaggtatttatgtaaccactattaagaatttgaaatattatttgctttcttcctttccttttcttgctgtttcctctaatttatattgctcatgactttgaaaagtcggaaatgttcgctagacaatgtgtggaagtacaaggaagtcggagagcaagtgcaggttggctgaaaaacctggttcaaacgggagcgtatggctcagtctgcaggtgtgacaagggctggggcgtattggactagaaaggtatcagtggcttgaccggaggaagccattgaaggatctttagcttagaagagaaatgataaatacagatgttttaaaaagatgcattcataaattctgattcccttaagataatggtggccacttaactttgttacataccacacaggcttccaaaatcatacaggctaactatgagagtagagagtttaatctgtagctcatgtttagcagaaatgtgagacagaaaatactgtgaacttcaatttactgtaagtggggaaaatatccaaaataacacagttagctccagagccaggatggtgcagcagaaggagattgtcttgggatgctgatatcatccaggttttgcacacagaagaaaataatgcatcctgtgaatgacttgggtaagtaaagctttgggacattgaagggacttgtggagaaagtacaggttggaagtgacgttgggggaatgtataggggcaaggggcactggtaaagagttggtggctctaggaggcttggttaggaagaaaaagacaaagttgaccttcctgaaacattataataaccatcagaagagtcagcccacaccatcccaaaaggatgcttttcattgaagacatagaacttcattgtgcctgtagaagaagggactcttggactaagaaacaaattccacctcccatccttggaataggatttcctatttgtacagattcaagaaaaatagctcttattattatgaatagaaraaactcatcttgctgtctcgcccaggctagagtgcagtggtgtgatcatagctcattgcaacctcaaactcctaggctcacacagtcctcctgcctcagccttctaaagggtcgggatcatagacatgagagccatcgtgcctgggccaatgtagttattaacagaagaaaacataagtgggaagcaaattttcaattaataaaaaatttctaaaagcaaggaaagaaaaaacctcaatgcaaagtaattctataacagtgcaacaagcctgatttaaatgttactaaccaaacaatggtacttaggaaagaacaccataaatcagacatttaaaaacacaagaatcaaaatggaataaatttctcaagaatgtaagaataaaagctcaagaataaaacaggataacgtgaatgagaaggctaactgaactcaggagaacactgaacgtgagcatctgagaagggaggaccgaaatcacagcgtgcctgtgggggatgcacagtaagagatagggaggttgtaaagaagagagtcaaggaaacgagataatcaaagaggtgaaaaggactagaagttgatggatgtggaagattggcaagaaatactcaacatgagagtcttgaaacaaaatcatgaaatggtttgaaacattgacagctcaagtgtgtgttattaaatacaaggatgtctgaaggtacacactaaaagggcccagcatgcacgtgagaaaactccaagacgtgtaactgctgtcatattttacatatacagggaaaaatcctttgatctccctgggaaaatgaccagctccccacagttggaaggggccaggttggtgtcagtgttctcagcatacggagccatacaagagcagcacagcctttccaggaggctcaggggaagaatgtgtgagtggagtgttttgctccttcaaaactgtcctgcaagtgccaattctgtggagagcagtctcaagcatacagagttcaggtgtgttgtacacatgagccttttgtgaataatcttacagaggattagctctgcctggctgatagatgacctgggtggaagttttatggtgagcactgaagatctaacagacgtaagaataaaacagtggagggaggatgggtggaagatggtacagtgtatatgaattttatacgcttcctctaataatcagctgaaaagcaggaagaggaggagaaaatagaaggagctcattggttgctacgtgggtgttaaggcagtcagagactattgaaagctgacgagctcaatagtagctgtcaaagcaaggagagtaggatgaaggcaggctactgggacagtggcaaaatggtagtgaccagaaaatacacacctcaccaaaaaataaatttggttttaaaaattagacaacagttgatcaattcatatggctaaagatgcatagtatgcaggctctttcacacagaaaattaattggatcagaaagcctaaaggaaagatatatcaagcaaatacaaataaaaaggaaacaggagttgcagtcttggtacttaacaagaataccagtatagaatcgagaaagcatttagaatgaggtgaagaaagatgctataagataataaagtccgtcataggaaactttaacatctacctgcagttcccagtgggtcaggtggacagaaaggtaggagaggcatagaagagagagctcagaacatgagcagtaaaatatatcattttaaatttttattgaactttgttccccagtaatttttatttgagcatatatagggtgtcaccaaaagttgaacatacatttgcttgtaaagaaatttttatttctataacatagaactcatacagacaatattctctgatcacaatgcaataaaattggtaagcagtaacaaaatcagtgaatgaaacgactttctgcctgtaaatgtaaatatattaatcaatttttgtatcataggagaaatataaactgaaattggagaatttctataaaatattggtaatggagacactgcatatcagaatctgaatctgtttgatatgtttggaaataggaaaatttataatctttatatatatatagcaataaaaataaaaatgaaaattaatgaattaaataagtatatgacaaagtgaacaaaaagagtgcagagggaaggaagaacatataaaggttaaggtcatataactaaaaaatagaaccttaaagccattctgttagggtggggatttcagaggccaggtaataaaaggaggtaagttttttaaaaaatactgtgtnnnnnnnnnnnnnnnnnnnntactgtgtgttaagtgatacaatattgattcagagtaaactgtgataagtaaaggttgcatataataattctcagagcaaccactaaaaaaagaaagaggtcagtagaggtgatgaagttagatgctaaagtgggatcaactggtttctttcccctgaaaaaagacaggtgcaggaaacccaataccaggtgtgacaagtagaaaacaaagagcagcaaagagcaagatggttgactcagtaattaaacgtctctgcagttaaaaggcagagactgtcagactggagaaaaacatagtacccccgaattcatagaactaataggcaacataaaatctacgagaacggattttttccttctaatctatagaataaggacatgtagtttattaagactatagaatattaaaataacattaggaaggcacttcagcatattgacagatattattaaatgcaacagctacataatacacatttttcaaaatctcatggaacaatcccaactatagttgaatataaaacaagtcttagtatatttttttaaaattgcaattgtatattcactaattacaatatggaattagaaataaataaaaaatctttaaaatcctcaggtatttggaaattaaactcaaaaacctaagtttaaaattagatggtttaaatccccaattaaatggacaggagtgtcaagttgtataaaaaagcaagattcaaatatatggtgcctataagaaaacacattaaaaacacaggtaaaaagtaaaaaatagataccgtaccaacactaatcaaagctggagttacttatagtaatatcacacaaagtacatttcagaacataatgagaaaagggtttattatggagacaagtaagccctaaacatttatgcactaataacagagctgcaaaatacggtcatgagttgcttaatagtagagttacattctgagaagtaagttagaccatttcgtcattgtgcaaacatgatggagtgcacttacacaaacctagatcgtgtagcctactacacacctaggttatatggtgtagcctgttgctcctgtacttcaaacttgtacaacatgttactgtgtttaataatgtgggcagttgtmacacaatgataagtatctgtgtatctaaccatagaaaaggtacagtaaaaaatgctgtataaaagattaagaaatgatacacctgtatagagtactaacgacaaatggagtttccagaactggaagttggtctgggtgagtcagtgagtgagtggtgagtgaatgtgaaggcctggacatgactgcacactactgtaaactttttaaacactgtacatgtaagctacactcaacctatttaaaaatgtttttcttaaatagtaaattaatctcagcttcctataactttaatttttttttttgagacagtctcactctgttgcccaggatggagtgcagtggcgcaatctcagctcactgcaacctctgcctcccaggttcaagtggctcttctgcctcagcctcctgagtagctgggattagagtcacgcactgccacgccgggctaattttttgtatttttagtagagatggggtttcaccgtgttggtcaggctggtctcgaactcctgacctcgtgatccatctgccttggcctcccaaagtgctgggattacaggcatgagcctgtaaactcatttttacatacctataactttacacaaagtaaattacacaaagtaatttgtgcccggccctataannnnnnnnnnnnnnnnnnnnnnnnnnnnnnnnnnnnnnnnnnnnnnnnnnnnnnnnnnnnnnnnnnnnnnnnnnnnnnnnnnnnnnnnnnnnnnnnnnnnnnnnnnnnnnnnnnnnnnnnnnnnnnnnnnnnnnnnnnnnnnnnnnnnnnnnnnnnnnnnnnnnnnnnnnnnnnnnnnnnnnnnnnnnnnnnnnnnnnnnnnnnnnnnnnnnnnnnnnnnnnnnnnnnnnnnnnnnnnnnnnnnnnnnnnnnnnnnnnnnnnnnnnnnnnnnnnnnnnnnnnnnnnnnnnnnnnnnnnnnnnnnnnnnnnnnnnnnnnnnnnnnnnnnnnnnnnnnnnnnnnnnnnnnnnnnnnnnnnnnnnnnnnnnnnnnnnnnnnnnnnnnnnnnnnnnnnnnnnnnnnnnnnnnnnnnnnnnnnnnnnnnnnnnnnnnnnnnnnnnnnnnnnnnnnnnnnnnnnnnnnnnnnnnnnnnnnnnnnnnnnnnnnnnnnnnnnnnnnnnnnnnnnnnnnnnnnnnnnnnnnnnnnnnnnnnnnnnnnnnnnnnnnnnnnnnnnnnnnnnnnnnnnnnnnnnnnnnnnnnnnnnnnnnnnnnnnnnnnnnnnnnnnnnnnnnnnnnnnnnnnnnnnnnnnnnnnnnnnnnnnnnnnnnnnnnnnnnnnnnnnnnnnnnnnnnnnnnnnnnnnnnnnnnnnnnnnnnnnnnnnnnnnnnnnnnnnnnnnnnnnnnnnnnnnnnnnnnnnnnnnnnnnnnnnnnnnnnnnnnnnnnnnnnnnnnnnnnnnnnnnnnnnnnnnnnnnnnnnnnnnnnnnnnnnnnnnnnnnnnnnnnnnnnnnnnnnnnnnnnnnnnnnnnnnnnnnnnnnnnnnnnnnnnnnnnnnnnnnnnnnnnnnnnnnnnnnnnnnnnnnnnnnnnnnnnnnnnnnnnnnnnnnnnnnnnnnnnnnnnnnnnnnnnnnnnnnnnnnnnnnnnnnnnnnnnnnnnnnnnnnnnnnnnnnnnnnnnnnnnnnnnnnnnnnnnnnnnnnnnnnnnnnnnnnnnnnnnnnnnnnnnnnnnnnnnnnnnnnnnnnnnnnnnnnnnnnnnnnnnnnnnnnnnnnnnnnnnnnnnnnnnnnnnnnnnnnnnnnnnnnnnnnnnnnnnnnnnnnnnnnnnnnnnnnnnnnnnnnnnnnnnnnnnnnnnnnnnnnnnnnnnnnnnnnnnnnnnnnnnnnnnnnnnnnnnnnnnnnnnnnnnnnnnnnnnnnnnnnnnnnnnnnnnnnnnnnnnnnnnnnnnnnnnnnnnnnnnnnnnnnnnnnnnnnnnnnnnnnnnnnnnnnnnnnnnnnnnnnnnnnnnnnnnnnnnnnnnnnnnnnnnnnnnnnnnnnnnnnnnnnnnnnnnnnnnnnnnnnnnnnnnnnnnnnnnnnnnnnnnnnnnnnnnnnnnnnnnnnnnnnnnnnnnnnnnnnnnnnnnnnnnnnnnnnnnnnnnnnnnnnnnnnnnnnnnnnnnnnnnnnnnnnnnnnnnnnnnnnnnnnnnnnnnnnnnnnnnnnnnnnnnnnnnnnnnnnnnnnnnnnnnnnnnnnnnnnnnnnnnnnnnnnnnnnnnnnnnnnnnnnnnnnnnnnnnnnnnnnnnnnnnnnnnnnnnnnnnnnnnnnnnnnnnnnnnnnnnnnnnnnnnnnnnnnnnnnnnnnnnnnnnnnnnnnnnnnnnnnnnnnnnnnnnnnnnnnnnnnnnnnnnnnnnnnnnnnnnnnnnnnnnnnnnnnnnnnnnnnnnnnnnnnnnnnnnnnnnnnnnnnnnnnnnnnnnnnnnnnnnnnnnnnnnnnnnnnnnnnnnnnnnnnnnnnnnnnnnnnnnnnnnnnnnnnnnnnnnnnnnnnnnnnnnnnnnnnnnnnnnnnnnnnnnnnnnnnnnnnnnnnnnnnnnnnnnnnnnnnnnnnnnnnnnnnnnnnnnnnnnnnnnnnnnnnnnnnnnnnnnnnnnnnnnnnnnnnnnnnnnnnnnnnnnnnnnnnnnnnnnnnnnnnnnncggaggtggggactgtcggggtcagagcaaaggcggaggtgggaacgttggggtcagagcagaggtggaggtggggactgtcggggtcagagcagaggtggaggtggggactgtcggggtcagagcagaggtggaggtggggactgtcggggtcagagcagaggtggaggtgggaactgtcggggtcagagcagaggtggaggtggggactgtcggggtcagagcagaggtggaggtgggaacgttggggtcagagcagaggtggaggtgggaacgttggggtcagagcagaggtggaggrggggactgtcggggtcagagcagaggtggaggtgggaacgttggggtcagagcagaagtagtggtggaattgttttcatcagaatagacttgggtggggccctggatttccaggccacaatgctcagttgccattgaggttctagagcctgaggctcccacacccttttaggagctggtgctggctgttgccctggctgctttaggacggtcggttggcctctcaggtgcaagtgccaagtgttgagcacaaactgaatttaggaacgggaatggcttcaccccatgaggcacaagacgtgtgctgatggcctggtgatggtgaccacttgtgggaggctgtgccactcaaagagagaaacttacttgtggttttcaagctaattaaagatacatttactttgtgtaaattacttcaagttcattcacacagatagcctttcattgcctttgatgttttctaacagtttttttctcattttagatatatccattctgaaatctgaattattttgatgatagttcttgatttttctgtgtatttttcaaaaaggaagagaataaagacatgataaataacttgtttataatgagaaaatggaattcagttaaattcaaatttatcaactgggcattgttaaggagtggtatccacttatcttccttttttatagtgtaatatacataagacaaaatatcttttgtgtcagcttaaatacttaaataagaattagaacaaattggctgggcatggtggctcatgcttgtaaccctagcactttgggaggctgaggtgggagttgagcccaggagttcgagaccagcctgggcaacattgggagacctaatttacttctttattttttgagatggagtcttgctgtgttgcccaggctggagtgcagtggcgtgatctcggctcactgtagcctgtgcctccttgttcaagcaattctcctgcctcagcctcccgagcagttgggactacgggtgtgcgccaccaagcccagctaatttttgtatttttagtagagacggggtttcaccatattnnnnnnnnnnnnnnnnnnnnnnnnnnnnnnnnnnnnnnnnnnnnnnnnnnnnnnnnnnnnnnnnnnnnnnnnnnnnnnnnnnnnnnnnnnnnnnnnnnnnnnnnnnnnnnnnnnnnnnnnnnnnnnnnnnnnnnnnnnnnnnnnntggggtggctcagctggagcacgcctgtagcctcagctatgtgggaggcggatgtgggaggattgctggagcctgccaggttgaggtggagcctgccctgagctgtgattgtaccactgcactgcagcctgggtgacagagtgagaccctgtcctaaaatatatatatataccggaattagagaaaattaattcaaggtccctgtggcagtatacccagtatgcatgctgatgcctgtgcagaatctaatggagatgtggcgctgtgatggtgtctgcttcctctttcctcagataatgtgagaacaacctaaattactgattgtataacctttttcattatgtgaatgattgatatcgctaatttcacttattgttcaaaatctgtatgtattgtcttggaagtttggagttgtaaattgtagccagttttgaagtattagcagtatttatagtcctttaacatcacattcccagttagtcattttgagaatgtattttctgctgtaatttcttttgcaaaccatagcacacttacattgttcatgtcttcttcagccaaaatactctccttcaaaaaagcaaacctctgctgtttgttaagtagggtatgctgttgagagaacagcatgaaatggtaacattttgcatcctcccccaagcagattttatctgttcacacttatagaccattaaagagaaggaaagtgaaatagaacattttagagataatttattttcagtcttcccagtctttattctgtgcttcatgagactggtaaaaaactatcttttggaataattttctccatgttagaaaaatgtttatagtcaatcatcgccattccagaactgaaagaaagatgcatagatattgtgttttcttcaacataaaattgtgttagagacagaaacattcatatggaaaaatggtcatagaaaagtaacaggaaaccagctaaaatttctaaaatgaaattatatagaaccttttgtttacatttgagaaacccttctaaaatttttatgttttttaatgcccttattctcttggactttgacattaggagaaaatatagtactaaaagattgacatgcatcaataattaaactttcatatcaagtgaatcattaggaagagtttaaagggaatacaattgtgtgaatttctacttgggtggtgaagtcacgatgggcatcttcaggcaggagaaccgggaggagcagrtgcctgatgcctcatacaggtggaaggcttagagtaacagcaggcaggaggccctggaggagcaggtacctgatgcatcatggaggcagtaggacgtggaggagcaggtacctgatgagcgatagaggcaggaagcttagagtaacagcaggcaggaggccctggaggagcaggtacccgatgcttcttagaggcaggagggcgtagaggagcaggcacccgatacttcgtagaggtaggaggcttagagtaacagcaggcaggaggccctggaggagcaagtacctgatgcttcataaaaggagactcagagtaaccacaggcaggtgactcattatagcatcatgcttgtgggcactgcaggtgaaagacatcttgattcctgtggatattagaaaaagaatttcatgagtgttcttttgtttattggacaatgttcattgcctattctgtgctaggtgctaggaaggtaatacccataaaatatgggattagaaacatgtcaattgctctgatacaataaaawtctgaatttatggtagataaaaattttattgcttcaagttttaaaatgataaatagggaattcagtatttggcttcttaatgccaactgaatgctcaattggctgtgccaacgctggaacctctagacccccagcaggtaaaggatataccgtgtcaaccgtatctgggaagtaggaatgaggatgtctatcttttttgtttcttcaacagtgttagaggatatatatcttttttttgtttcttcaatagtgttaagctgagttagactgtaacaccatttgtttgaatgaatcagaaattgcccatttcagtgcaatcctaaattcaattacaaagtagtctaatccatagaggctacttgctttttctttaaagttgatattttggttgttctatcaaatcataaaagtcatagggataactcagtttttctggattgtttatcttagcattgaataaattgtatgcctttactctgagcagctactttagttataaacaaagtaaacaaaaggcagtttccatctggtattttctgtggaaaaaacaagaacagtgttggaaaattaagtacttggaatgttcttctgtgttttaaagcccgtaatagtggtgtgttagctactgtgcaggagcttaatttcattccagtgtattttgacattggtaaacatattaccattagtatgaaactatataaaaaataaagcagttaaaggtataaaccacttttacagccctcctcccttcctgatacaaatactagtattactcttttgactcttccttttaagttcttttcccttgtaaacatgcaaatttatattgggataatataattctcaggttttccacttaaaaatatatatccttagtattttgcatatgaatacaggttaattatcagatttttataagttgtaactgctaagttcaggaaagcatgcaacatgttgtacttgataaagtggaattaattgaaggaagtaattcctaagggactgtagagttaaaggtatttgtgtatctgcagaaatagtaattggtccatgctggagtcagcacatactgtagacagattgtttccatccaggctgtgtctgcagggcgcctgctccttaagaccattgacatcactgagaagacctctttgtgtcctttgttgtggctggcattgcacttgtgcctactgagatcatattgtagatgacgtaaccaaggtactgtttatttaaatgccagtgtatatttttgaaatgattttttttttcaaagaaacagcactccagctgtgttgtaaacaattcccagcatcatagccttcattctcccaaaggctcagacgctaaggtcagtcttcaggtcaggyggtcgccttcttgtgaagggacgtggtggaaggttcatgatccccagggccctgagagtctgaccctgagctgcacctgcattgcaggacacttcctaactactgggcttgctattttgggcatacaaggcaactggaggccaaaygccttcctcaaattgaatgtaattgaaaatactttagttactaaataattgccatattaggggaaatattttggaaactgttaggattggtttagattctgtgcttcacaaataaacaaatcaagtatatgagagaatcagatatctagcaaatatcttccaagtaatgagcaaaacggccaaaattacatcatctgaaagtggtttgataagtaactagaaggaaaacaccagttacataaacgtattttgtacatgcagattattttggaaaatatgttttcaatttctttccttttcaaatttgatttctttttttttttcttaaggtatatcctgatagcaaattatcatttcataacaaaatacagtttgtggagggggcattattttacgggagacgcccaacagtcaggacagtgtgtggcttttaccctatccagatgtcgaggtcactgcctcccacacgggacgtcttccctgtgttacttctagatgcagggctgtggatgcattcctttattctagtaaggcttccattaccgaaatgtaggccatgactttacattaagatgaaaaattcccagattttaaattgtaattttcttctctgaatatgaacattgaaagtgtaaatgtaaaactagactgtacatattgctgtcgtgatactgatgtgtggccatattggtttgctatctgttaaggtagttagcatcatataacgtacttgaattttgtttaagaatatttcgtgtaataacagcatacttttttttttttttctttgagacagagtctcgctctgtcgcccaggctggagtgaagtggcgtgatcttggctcactgcaagctctgcctcccgggttcacgccattctcctgcctcagcctcccaagcagctgggactacaggtgcccgccaccatgcccagctaattttttgtatttttagtaaagatggggtttcactgtgttagccaggatggtctcaatctcctgacctcatgatccacccacctcggcctcccaaagtgctgggattacaggcgtgagccaccgcgcccggccaataatagcatacttctaaagaggaatttaagagaaatacatttttaaaatatatgtttattttttaacaatattcacagaagcattttctctgtcgtgaatacatgcacacttaaaaagcattgcccttgtccttcacaagagatagagagaggaaattatgctatgcacgcaaaagaaatgttgaagagttgacttgtggttatttctgtgctaatattttctacttttccaggagtgttgttaaatgatgtgttaaagatgtagttgaatacgctaggcatgctggatgcacctgtaaacctagctacttgggagtctgagatgggacgattgcttgagcccaggaatttgagaccagcctgggcagcataataacacctcataaataaataaataaataaataaataaatattagaaggtatagtactttcatgaaaatttagaattatttcgtttgtgtattaatgttaagcattgcaagcaattaattgattacaggagttctttgaacttgtactttcaattttttatagtcccttttttctaacgtctgttttgcagtgcctttgcactgctgttcacttggattgagcttgtggacctgtttctaatactgaggttatataaggtgtgaataatgaacaatcatttgacggttttgttttctttttgtctccctgcacaggaagacagtgacccgcccattcatgaaagtctcagcatagaaaatacattgtgggcaagcaccattgttgcatcaggtaaggaaaacattctcctctgagtgtgattgctcccggatagatgatgctttgttttgtccagggactccaaacaagggtttctcacagtgccctgaaatatttagggaccttgctaaacgcagactccagctcagtgggtctgagacagtcctgggagcttgtggtgaggcttgtgctgctcctcagacactgcacgtggttcgcaaggcctgagacagggagaggtgctgcagccttcgtgcaggagtacagggatattctgttcgtctttgacctgtttcttgacaaacttgtcagtgttccttaatgagaggcaccacagaagagcttgggaagccagtggtgattttagcgcttctcagtcatccgacaagggttggcaggaggagagtggctgaagtgactgtggaacggaaaagtattagaagaggccaggcgtgctgtgagaggtagacgatgtnnnnnnnnnnnnnnnnnnnnnnnnnnnnnnnnnnnnnnnnnnnnnnnnnnnnnnnnnnnnnnnnnnnnnnnnnnnnnnnnnnnnnnnnnnnnnnnnnnnnnnnnnnnnnnnnnnnnnnnnnnnnnnnnnnnnnnnnnnnnnnnnnnnnnnnnnnnnnnnnnnnnnnnnnnnnnnnnnnnnnnnnnnnnnnnnnnnnnnnnnnnnnnnnnnnnnnnnnnnnnnnnnnnnnnnnnnnnnnnnnnnnnnnnnnnnnnnnnnnnnnnnnnnnnnnnnnnnnnnnnnnnnnnnnnnnnnnnnnnnnnnnnnnnnnnnnnnnnnnnnnnnnnnnnnnnnnnnnnnnnnnnnnnnnnnnnnnnnnnnnnnnnnnnnnnnnnnnnnnnnnnnnnnnnnnnnnnnnnnnnnnnnnnnnnnnnnnnnnnnnnnnnnnnnnnnnnnnnnnnnnnnnnnnnnnnnnnnnnnnnnnnnnnnnnnnnnnnnnnnnnnnnnnnnnnnnnnnnnnnnnnnnnnnnnnnnnnnnnnnnnnnnnnnnnnnnnnnnnnnnnnnnnnnnnnnnnnnnnnnnnnnnnnnnnnnnnnnnnnnnnnnnnnnnnnnnnnnnnnnnnnnnnnnnnnnnnnnnnnnnnnnnnnnnnnnnnnnnnnnnnnnnnnnnnnnnnnnnnnnnnnnnnnnnnnnnnnnnnnnnnnnnnnnnnnnnnnnnnnnnnnnnnnnnnnnnnnnnnnnnnnnnnnnnnnnnnnnnnnnnnnnnnnnnnnnnnnnnnnnnnnnnnnnnnnnnnnnnnnnnnnnnnnnnnnnnnnnnnnnnnnnnnnnnnnnnnnnnnnnnnnnnnnnnnnnnnnnnnnnnnnnnnnnnnnnnnnnnnnnnnnnnnnnnnnnnnnnnnnnnnnnnnnnnnnnnnnnnnnnnnnnnnnnnnnnnnnnnnnnnnnnnnnnnnnnnnnnnnnnnnnnnnnnnnnnnnnnnnnnnnnnnnnnnnnnnnnnnnnnnnnnnnnnnnnnnnnnnnnnnnnnnnnnnnnnnnnnnnnnnnnnnnnnnnnnnnnnnnnnnnnnnnnnnnnnnnnnnnnnnnnnnnnnnnnnnnnnnnnnnnnnnnnnnnnnnnnnnnnnnnnnnnnnnnnnnnnnnnnnnnnnnnnnnnnnnnnnnnnnnnnnnnnnnnnnnnnnnnnnnnnnnnnnnnnnnnnnnnnnnnnnnnnnnnnnnnnnnnnnnnnnnnnnnnnnnnnnnnnnnnnnnnnnnnnnnnnnnnnnnnnnnnnnnnnnnnnnnnnnnnnnnnnnnnnnnnnnnnnnnnnnnnnnnnnnnnnnnnnnnnnnnnnnnnnnnnnnnnnnnnnnnnnnnnnnnnnnnnnnnnnnnnnnnnnnnnnnnnnnnnnnnnnnnnnnnnnnnnnnnnnnnnnnnnnnnnnnnnnnnnnnnnnnnnnnnnnnnnnnnnnnnnnnnnnnnnnnnnnnnnnnnnnnnnnnnnnnnnnnnnnnnnnnnnnnnnnnnnnnnnnnnnnnnnnnnnnnnnnnnnnnnnnnnnnnnnnnnnnnnnnnnnnnnnnnnnnnnnnnnnnnnnnnnnnnnnnnnnnnnnnnnnnnnnnnnnnnnnnnnnnnnnnnnnnnnnnnnnnnnnnnnnnnnnnnnnnnnnnnnnnnnnnnnnnnnnnnnnnnnnnnnnnnnnnnnnnnnnnnnnnnnnnnnnnnnnnnnnnnnnnnnnnnnnnnnnnnnnnnnnnnnnnnnnnnnnnnnnnnnnnnnnnnnnnnnnnnnnnnnnnnnnnnnnnnnnnnnnnnnnnnnnnnnnnnnnnnnnnnnnnnnnnnnnnnnnnnnnnnnnnnnnnnnnnnnnnnnnnnnnnnnnnnnnnnnnnnnnnnnnnnnnnnnnnnnnnnnnnnnnnnnnnnnnnnnnnnnnnnnnnnnnnnnnnnnnnnnnnnnnnnnnnnnnnnnnnnnnnnnnnnnnnnnnnnnnnnnnnnnnnnnnnnnnnnnnnnnnnnnnnnnnnnnnnnnnnnnnnnnnnnnnnnnnnnnnnnnnnnnnnnnnnnnnnnnnnnnnnnnnnnnnnnnnnnnnnnnntgtgctaggcccatggagaaggcaggtgtcacacaaacagggcagctttgtgtgcttgtgtttaactgttggcctgcagtatgcaaaactaactatacaacgaactccaggaggaggacacatgttagctttttggatgatagaatttgaaagaggattcatcttatcctagtgttttgtgtctttaaaaaatgcttgatgggtatatgacagttttaataggtgacaatttttgtgggtgtttcatgatgttatttatatataaattacatctatatataaatgttacatacatataaatgttatgtgtgtgtgtgtatatatatataaacatacgtatataaatttcttaacatacaaagaaagagaacaagacagttttccatgaagagacttcagaggtgagcaggacagtttctgggctctgtaggcctcgagagggacctcatgccaggaggactcttctggggtggacaagtgggccctgagctctgtaagggtcttcacaccatgggcaggcacatttagccagggaaacctgccctccagccttcttcatgctgctgccttggcattgctgagaggcatgagtgttgccagcctctccgccaggtggtgagtgtggtcagtgctggcctggcctcacgctgaatggctgcactcgggaggtgtgttccccctgccagttaccatagagccaggctgcacagggaccagaatggagtccagctgtgcattccctgaaagccagtgtccttgagtgctcggccttcagtagttacacgaaagcatttatgatacaggactcagaagctgacacatggggagaagacttacattttccatacatagttattgcagcctgtttcttccatctcactgatatttgttaattaagaatcattcgtgaagatagtaatgcttccctttttaaaaataaatttcatctttttttcctggtgctgcataaacatatattaaatgttgttactgatccctagtactgttgatttgtgacccttctcctgagggagactaaagctgcttgagctaaaggcttttgagacatcccatacggttccctgaacaaagttttctctcctgacctcagttctcttgatgaccttggcaagtgggcccgactagttggacactaatgaggcatcgtaacatgccggccccatcctgtccattctgttctctttgccatctagcattcagtgttgtgtcttcctagtgggcatgaagacggctttaaaaccatccactcgagaagcttaattaaggtacctttaatgttagtttgtattcgaacatctttaaatgtaagctttaatttcagctcttttagtacatacatatctttatttaaaagccttgttaatgtgaacagttacacattctatataccacactgctatatcctaaggaatgtttgaaagattttaagatttccagagtaacctaggcactcttgtattctttgtaattgattacaagttgagaattccttttactcttatactttaaaagtcgtatctcagttgaattcaagttgactctggaggggaagtgaactcagtgcttcctccccatccctagagttctgaatgcatgggaaccgggactcaggttagacacagacaggcagatgcagcagacgagaggtgagccaaggcaggacacagagagcctgctgtgctgccggaggtttcacttcccatgtggatccagaaaacttgctctctaaaatgcagaactgggtcctggagaaccatcgtgtttattatactgatgagcatacaaaggagtgttcctgatactcagctgtcacaaaactggaaggaaagctgggctctctaaggcaaggttgacaaaagtgtgacggggctgtcagagggcaatccctggccatgtggacccacgcctgggtgcgggtctccttgtcactcagtgggccagccgtgtggtgtctagacctgggtgagggtcttctgtgtctctgtgtctcagccatgtggactctagacctgggtgtgggtcacctgtgtctctgtgtcctggctgtgtggactctagaccttggttgggggtctcctttgtagtctgtgcaccagttttggtctaggttgtttacatcctggggctcagttcacggtcttcatcagttttcctgcacttggtgcgtggttggagttgtacgtgcagtgctcagtgtctgccttgctatcatcgggtccagcccgggagcgcctgccccagggagcagtgcacactggggttctgtggaaattggctcctggagggcatctgcgagttggagtgtgttccagaggctggtgtatgtggccctgcctgcttttgctaacggtatctagcaggttttgggtgtataattgagagtcaacaaatacattgatttgttaatacctctgtctctcattagacacacatgaaatacatatttacttttagtaagcatttcacatcattttgatttgataacttaaggccattaattgttttgttaaagtggtctaggttttatattttgtgtttttaaataattttctatgaatcatcttaattaatttgaatttgtgaggattggttatctgcaaattaaacatatcagtggttagaaatagcaactaaaagtattgcaataggcctatcatttgaaatattgagtggactacttgtttggaagtgctggattatgatttctggtataaactagaaatgtttaaataaaggagagtatatttttctacaaaatttgaccttgttagcattctttgtcttgctttgcaacwtggaagttgtttgcttaaaatacaactgtagtcaattagaaggtggtataattttgcatgaaattttctatatagcctgtagcaaggaaggcacatagtaactaacagagtaattattatcccactcacatgaaattgtgattgaacagaagttggacatgatagggttggactatagaatgacttgcagaccatccacatagcagcctctttgaagtaggctaagtctcgagggccctagtcatggggtctgtggagtgtaggagtaaatgtggtcatattttatgcctccctttttggacccaaagcatctgaatatttaatattaatttttacctgtagtcaatttgaagtgtgcagttatggatcaggcaaatgtaatcactggctttgaagattaagtgctcctaaatcttttaaaatgttgtcttgggataaatgaagttaaatttttgatttaatgatgaatactggaccaccatcatttttagggtcctgttaagaactggtttgttgttgtggttgtggttttaatctaccaacatggtcctgaactcaggtctttctgatgtagaagtttctccagttggagcgcgttgtgagggaggtggatcttgattttacactgaaaatatgggttaaagttttggaattcttctgtttaagtatttcattgagtgagaaatctttgtgacatttatatttgtcacaytcagtctcctgttatcttatacgacacaaaatgagtttatcatactttgttgccctctcatgtctcatttcgcaatccacagttaatccctttcctctgttttgccttgtatactcaggttttactcagtcttttagcctattgtacttcataagtacataccctttgtgaaagagaatggaaaatgtcccaaatatttctgcactgattctagttacgttagatattaaaaagcatgacactcagaaaaattcatttaatctaattctagtaagtgttgatttttcatgagaatcaagtgagagaatacttacgagagcctttagcaaactttaacagattatacaaatattgtaccaggacctctgttaaaaatgtataacatatgccttgttatgtatcacattgaattgaggtactgtgcattgtaaggccactctagagtccactttgctcatcagtcaacctgctttcagctcaacggtttctagcttgattaattcttgcaaagccttttctgagatttgctcattctgctaatgttaaaaaataagttaattttgcagtttgccttcttacatcattgtgataatttaacattagtgggatgtttatattttgatttaaactagattggcaaaacagaaaatactgatcagatgatatttaatatttagcttcactgatgtgaagtaattctatgatctccttttgaaagctttttatagtattgtattatatatttaatatttctctgcgtagtaagtatagtcatctaatctcagaagtttatgtggataatagtaataaagacggcatttgtgcatcggggagcttatattctaagtgtgagctggccttgcctttcatgaacttttacaaactgaagcctcacacttctcagtgacactcaattaaaagagaaatatatataatctccacacatatccctgctggggaatacttcacatcttccaccttcctagattttctagagaggaaggtgtaagccatgtgatatgtataatatgtaacatatcaaggttcacgaaaagccgggagttcatatcaatcatctttacttcaaagagcctgtcttatgatgctctgcattttacatgttaagttaatgtgacatcagagttttcatataattattatagttaattctgtaatggttggtaattgcacattatgtgtatatactttctcaccttaattgtgtttctcaccttcaaaatttacaaaaaattaaggatgaaaattaggaatataaattatatatggctgtagtttcagaaagagatttccatggtttttaatactgacattctagagataagtgccctttagcctttgaaatctatcggtcataccaaggatattttattattcttttctcttaaatttaaaaattattatatctttttgacgtgtaaaagagagtaatagcttctaaatgcaaagtcaaataccgttttttataatatttctattattttaattgtacacattttgaaatattagcaaaggctgtcactgatatttagtaatactttgatctttacagtggaaatacactaaaagaaagtggttcatctggtaccatctttatttgaaggtcaaaggacaagtttgattagttaaggatatagcctcttaattgaccttcagtgatagaaccaccattttagtagacagtagtgaaaggccattgtcattatctctattgtcagtgaaaasaatattagtacgtttcctaatgttatatgtgggtacatttgtattgcttaacaaatcatttgactttttcaaagtccatttttaaagttgagattagattttcttgaattagccaaattaaatacactgttggataaatttatataaaatcaaatagtgtgataatactttccatcaaaacaattaattagaaagtgttatcttttactcatctttaaagtatttctacaaggaccactttcatgtttttgcaggtactgtaataggtgttgtcatttataccggaaaagagactcgaagtgtaatgaacacatccaatccaaaaaataaggtaggctagattgaggagcaactgctttaatgaacttatttttcctttcagtaagaaagtctgcatagttctgaayagctcattcttttggcttaacatatatcttaaagtagactttcaaaaatgttggtgacttacaatatgaattctccgtatttatataacaacattctcatactggcgaatttccaaaagtatcattgcttggctaatcagttttatatgtgtcttaaattttcattgtcagatatataatttgcccgtaatttgacagttaattgtggctaatttcttatcttcagtctacttattttacaatttgcactcttttatgttgatggttcattttaaaataaagcaatctgtattaatgtttttatactatttaatttgatgttacagtattaagccagttttatttatttccatgtcagaagaagcatattgaagccaaagattagttttaaagaccrcttgattatatcctgaattgattatatttctaaaattgttatttatgcatccaacatgtgtgtaaaatcataacaaaaagtctgaatcctcagtagttgctatcatcatgataccatatgtgagatgaattcacagtatgtgctaatgtacagttaatgagaagctcttcctaagtattgattttactcatttttatttaaaatgtaatttatgtgcatttagatgaaacaaaaaatcctcacatggatttatgcctcactctgtgggtaattaatagtgaaggttatcttttgctgtctttttctggaagtcttattaacgcagtggaaatcaaataattctttgaaaagataggccaagccgttggtggctcacgcctctaattacagcactttgggaggctgaggcaggtgggtcacttggggccagaagtttgagaccagcctggccaacatggtgaaaccctgtctctaccagaaatacaaaaattagctgggcatgatgacgggtgcctgtagtccccactactcaggaggctgaggcaggaggatagctcaaacccgggaggtggcggttgcagtgagccaagatcgcaccattgcactccagcctgggcaacagggtgagattctgtctcaaaaaaaaaaaaannnnnnnnnnnnnnnnnnnnnnnnnnnnnnnnnnnnnnnnnnnnnnnnnnnnnnnnnnnnnnnnnnnnnnnnnnnnnnnnnnnnnnnnnnnnnnnnnnnnnnnnnnnnnnnnnnnnnnnnnnnnnnnnnnnnnnnnnnnnnnnnnnnnnnnnnnnnnnnnnnnnnnnnnnnnnnnnnnnnnnnnnnnnnnnnnnnnnnnnnnnnnnnnnnnnnnnnnnnnnnnnnnnnnnnnnnnnnnnnnnnnnnnnnnnnnnnnnnnnnnnnnnnnnnnnnnnnnnnnnnnnnnnnnnnnnnnnnnnnnnnnnnnnnnnnnnnnnnnnnnnnnnnnnnnnnnnnnnnnnnnnnnnnnnnnnnnnnnnnnnnnnnnnnnnnnnnnnnnnnaatatatgcaagtcagtagttctacaatagtgttacaattatttaaaaataaattattaaagtaatcatatatagagttagaatcacatacgtatttatatgtgttttctgataagtgctatgttatttttttcatgtgagcaaaactagaacatcttttttttttgagacggagtctcactgtgtcacccaggctggagtacagtggtgccatcttggctcactgcagcctccagctcctgggttcaagcgattctcctgcctcagccttgcgagtagctgggattacagatgagcaccaccccacctggctaattttcatatttttagtagagatggggtttcaccatgttggccaggctggtttcaaactcctgacctcaagtgatctgctcgcctcagcctcccaaagtgctaggattacaggcgtgagccaccgcacccgaccacaaaactagaacattctaatgtatgtacagttctaggatttttttcctaaatgttacttttgcatttatgatgatatttgagggtaaattaattttaaatatgaatttaaaatctttaaagctacactgccttttactgtgattccttttttagcccacctttttcttcagttcaacttattttctgtcattttttcatttcagtctccactttattatttcttcccatctatacacctgttacttttggctcgtcaagctctttactcagggtcttggttctgcgttggagcggcctcctagttttgcaagcatggtttggaatgtagccctgaagcctcgctgctgggtctgtgtccaggccttggtgcacactcgtgtgtccctcagcctcttcaccctctccaccctcccctctctgaagtgggcttgccaggaacaaggtcatgctcatgcacacgttgctcttaggaaagtacttgctacatgacagatgctcagtaaatgttagctgtaatttttatttttctataaaaggaaaggttttcagtgtggtaatttttcagccctaccctgattgctagtcaagaaatggtcattttgtaactagtttgtgcaaggcaggaggttctgtactgtcagctaccacgtggcctagaaattcttccagtttccgctgtgtgggcattccttctctccctcttcttttcttttccctgttcctctcttcctcttctcctttcttaaaaaatagtcttctaaatttgcttattgttggcagaatatatctcataattgaaagggtgtctttggagttttacagaattggatttacttcttgctgcttaccatgttagcttttcaacctgatgtaaaagtgttctttcagtggctggtattttcctggtgattaatacatgctgagtcctcccctcccaatagggattcacgatagcggttctagctccagctggagaacattgaccacatggtaggcacttgtnnnnnnnnnnnnnnnnnnnnnnnnnnnnnnnnnnnnnnnnnnnnnnggagaagagtgcgttcccgactgtagagccggggagatcacaaggcatggagccgtgacacgtctcaagacaaagcgctgctgatagtgaagctcctgaggacgttttccttagatttggtatttatttctttgtttgtttatttatttatttattttttgagacagagtcttgctgtgttgcccaggctggagtgcggtggcgcaatctcggctcactgcaaactccgcctcccgagttcacgccattctcctgcctcagcctcccaagtagctgggactacaggcgtccaccgccacgcctggctaattttttgtatttttattagagacagggtttcaccttgttagccaggattgtctcattctcctgacctcgtgatccgcccgcctctgcctcccaaagtgctgggattacaggcgtgagccactgcgccccgccagatttggtatttaaacatccaattaagacataacataacagggaaatgaaatatatacttaaatatttctgagtgttaaatgctagttttacaagaataaaattcaggagaaggttttgagcaagctacactgggcgaaaggtaacatgtaatttatccaggggaagcctcggtattgatacatgttgaatggaagagaattgtgacattggtctctgaacagagacggaaaggtggaaattattgtttattgctggtaagactgttttctgacggtgacatcacagtgttcttctgttgcttagtaaaccaacaaacttttgggcttcaaagaaggctggtgcaaacaaaacggtaaacatgtacaggggaaatctcatctcatcctttacctgagctttgttggatttcttcaggtagcaaaaatgtttctaacactcaattctgacagctctctgagtagaagccatattgggacattgatacattggagttcgtcgtcagcagagaaattgagctgcaaatacatatttttgaatgagtagtggttatcggtcaggataggctgagtcatgctctgataataaagtgcctcatactccgcagtggcttccccagcgttgtgtttctcatgttccaggtccggccaggctggcagctcctgctggtcatgttttcctcatgttctgtatctggcacaggctggcagctcctgcttcttgtcatgttttcctcgtgttccatgtccggcacaggctggcagctcctgcttcttgtcatattttcctcgtgttccgtgtctgacgcaggctggcagctcctgctggtcatgttttccttgtgttccaggtctggccaggctggcagctcctgcttcttgtcatgttttcctggtgttccatgcctggcacaggctggcagctcctgcttcttgtcatgttttccttgtgttccttgtctcacgcaggctggcagctcctgctggtcatattttcctcgtgttccgtgtccggcacaggctggcagctcctgtttcttgtcgtattttccttgtgttccttgtctgatgcaggctggcagctcctgttggtcatgttttcctcgtgttccgggtccggcactgactggcagctcctgcttcttgtcatattttcttcgtattctgggtccagcgcaggctgacagctcctgttggtcatggtcactcagggcctgtcttggaaacacatttccatgaccactgggataagaaaatactgatgtggccaattacatactgactgattcttaaggctttgcgagcgagtgatatgggtcacatttcattggccagaacaattaaaaggccttggccaagttcaaggagtcagggagttgcacttctagctcgtgtgcagaaggagggagaattggaaatacttcatgagcagcaacagccacgaacaagatttcccagggcttttacacagtgtacgaaaaagaggaaccttgcagaacccggaagaataccaatatttaagggataaggagaggaagagaaaccaggataagaataatgaatgaggaaagcattttagggagtggccagtagtcaacagtgtgctggggacagagaagatcatttggagtgaaaagtagaaaagaggttggtaattttagcaacgaggaaatcttggtaaaattaaaactgacagtacgtttattagggtgggactcaggtgcaatcacagctggaggactcttccaagggtttgggggaaggagagagtgctgtgttgagggagccgggtccagggtgagggagagggaattctgagcatatttaccaggcagcccagagcatggcggtggcagtgctgatgagaagtggactgattgtgctgtaagggaagagattttattgattttggttttttttttatggtgagaaaaatccatatcacaaacctattaatgtttttagtaaaagaatagggggtcttacaaataaaaatattaatcatatggaagaataagtttagtgggcatccagtagtaacttaaacaggataagattactgaaaagaaaatcatatagaattacatggccaccacaggaactatggcattacttctttcatttgtagaaaatatttcaagtctatcagtatgtcactctttctgtctccctcccctcttctctttctttctcctccctctccttccgtccttttttctctttatatttatttcctttcttcattacagtgtgtatagcaggaccctgacaattcacaaaattgctttacgttcctgaggttaaaaaatgcttcagtaaaatctgatataagaaagaagttaatcacaacaacactttcggtagtgaaattgatgcaacatggtaagactttgagacagttcttgaagggctcaagaagacgagagcctaacaatttaggctcatacattgttggcaatgtgaaggatccagctgttgttgggaatcttaaatttaaaatggtgccagtaaccaggatatggctgttctgaggctgatgttcaggagccccaacgcagaagcagagataggctgctgggctggtgcagaggtttgcatgtggacatgtaagcagagaaggcagggacagccggtcgtgatggtggatggcagtgagagggctccttatggacaaggagttttggaagcaaagtagttattggtggtaagacttcgagtacagtgatgaaaatgagttgttgaagtttggaggctgttacagacactggattatctaaaattataagcttttatataatattttggagagcatcctttccttcttacaaatattttctgccaggtgcagtggctcactcctgtaatcctaacatttagggaggctgaggcggccggatttcttgagcccaggagttcgagaccagcctgggcaacatggcaaaacctgtccctaccaaaaaatacaaagattccctgggcgtggtggcatgtgcctgtagtaccagctactcaggaggctgaggtgggtggatcgcctgagcctaggagtttgaggctacactgagccatgattgcaccactgcactccagcctgggcagcagagtgagaccctgtctcattaagaaaaaatagattaattaaaaaaaatacagccactattgtagattgtatgtcaaggcaaattgagcatcatttcacgattttctaggtttatccagtaattgatcttctagggagacaagtcttatattcggttgcttgtagatctcttatgtaaattcaatttaataaataccacatttatagagttatcttctttattccatgatgcagcagtaagaaagaagagagtgcccttttcttttcagctggagctgtaggatgtcacgccctcttgctgggccctgctgcctctgacttgctctcttcagcctttgggcctcttgtgcttttgcctcagtatctgcagcgtcctctcccgttgccctctactgtaggtgtggcctagactaggaagttcctgggatataattgccttaaaaatcatccacataatccctgctacatagaatggttaagcaattgacattttccaatgtgttgctgttccctgactctagcagagggtgtaaagcccataagactgtgtggccgagaccaggccttgagtccttggtacctgttgttaaccatgtgcaagtcccagtgctccctgttggtcttcagcccctgatgggccctcaccacctccaccaccgactacccccgagtcatcccagccccaccagaggcttcatgtcctcctgcaggacatgaaggagcatcctcagctcctggaagagcgccagcctcctgcagccatctgcttccacagattcagctgataaggaggacttgccccatctcagctgcaggttcattgaggaacagtgtgtgttagtactttcaaaactatcaggctgggcacagtggctcgtgcctgtaatcccagcactttggagctcaaggcaggcagatcacttgagcccaggagttcgaggccagcctgggcaacatggcaaaatgccctctttacaaaaaatacaaaaattagccgggcgtggtggcgtgtgcctgtattcccagctacgcaagaggctgacgtgggaggatcacctgagcccaggaggcatagcttgcagtgagctgagattatgccactgcactgcagcctgggttacagagccagaccctgtctcagaacaaacaaacaaaactccacctatcctcccagagttaagttgatgtatgttaggtatttaactagttttattaattgcattataaaggctttttttttttttaaacttctagttctcctcagctaacatccccaaacttctttggccaatttttttttttttttgcctttattttggccaattttgttcttttttagctgctttaaaaaaaaaaaaagaaagaaaaacttatgaaaaattttaaacatacagaaaactaaggagaaaagcataactcatatccctagaccctgagttcaacagacatttcccacttgcctatcctgtagttacaggtaccatgctgcattatcctaaatatgtactttttccaaaaaataatttatatttatctcttagtctttatcttttatttttttagacaggcagagaccaccagcctgcccaatatggtgaaaccccgtctctactaaaaatgcaaagaattagccgggcgtggtggcaggcgcctgtaaacccagttactcaggaggctgaggcaagagagttgctcgaacccaggaagtggaggttgcagtgagccgagaccgcaccactgcactccagcctgggcaacagagtgagactccatctcaaaaaaaaaaaagacactttggctgctgccttaactctctttcttgtttctgtgacgcctggttgtccccacactctaggtgaagtggtgtgtagagggtggccccacgtaggcaacawcagcagcagagctacctgtattgatcccaccccctggaatgggacctgaggacgcaacttcctggttctcctccctggactttcaaaaaatgcagcatgttttatccagacatgaagataagaataaatccttccattttgttagatagaggaaaattctgagattaaaaagaattcttgaaggtgaggattagaatattttcccgcctcctagtgcttatgacagagagatttaaaagaagatggagtctactcaaagtttgaaaattttaagactaaacaaaagtttttattactaaggaattactattatattagtatttggtgaaagttcaaattacaaggactacagtttgagtaatggactcgtttataaaagccagcctcagacatatttaatgatatgagacttgattacatttaagggagaaaaattcttgtggaggttaaggaaaaatcaattgtgacaggttgccattttcatgccattcataataatcagttactcagagcaagaacatcaaggatgaaatgataatacaaattgcttcaagcagttattgtaatcccttgggtatattgatttgtgtatctaataaaaagatgctttcagatgtctcattggcagagagataggtgacatgagccattatgagaattagagctggtgcttgttatctgaatagttgttgagaaattttgagatcatggaacaaaatagagtccagctgtggtgtactttgcaacttgaaatatcaaagcagttttggagactagctttcttgttttaaaaaagataatttattaatattttaaaagttatattgatttatattaaaatattacaataaaataacttatttttatcttttcttgtagttgcatacaatcatagaatgccttaatttttctaacagttgctttcttgtaataaaatactgtagagtttaaatacttattttaaaatgtgcccatgtgcttcaccaaagagctacatattgtagaacatattagtagtattgcagtaaatcaacagagatagaaagactcttgggatgctttttttgggataactgttgttaatattcacaaatcatagtgtttcagttcctcatcaggaaaagattaactagaaaacaaacccaccatgacataattctgtagcttctagactagacccagggtggctctttggggtacattagcacagccttcacttgcatacccggcacactttgatatgacagctgctcacaattagaagttgtagttcttcatctgcagtgtgaacataaataaacttataatttcaggaaagtagtaaagaaacaaaatgctaagtgttgaaaaaacaatcctactgatagcatctggggcataatgctctatcagagtgtatagcaaatatctaaactagaaaacttagattttgtccctaaattccttttaaatatgaatttaattagaaaacaggtgctccaaataaaaaatgcaagcatttttattattgtaattgatttctatcacagaaaagacttagttagctttacataaagttctgaataagaagggcttactaattatttgttgcatattaaataagaactatatttgacagtatctcatcatttctaagcggtatagctaaattctctgtaatcaaaattcctaacagagaagtgtaatttattcaagaagcaagtattttcataattgtctttattttttgaactccttgattccttacccctgtgccataaaagctgttagaaatgtatggaccttgtgataatgattgacttatgacatttcctgcaaaactaagcatgtctccctaccagatcatgccccgtgatttctgacgaggcgatctggaatgtctcgtgagactgagaatgggaaagtgctggaacctctgtggggtggaaagcaagtgggcatgtggatggtggttatgtagttgctgaagatggagaagggagagtcggtatcaccttccccagkaggatttctgtgggctgccagactaggkagggtctggggttcatggacatgccctgtctcatgcaaatggattccctttgtggctacyatacatcaaaaacaggtcacgtgtgtgctgtgtgttcagaagccaacttcaccagggacaccttcaagccagcagccagctagcagggcaggtcccttggttttctaattgtcgctgccaatgtctgttggaacaaggctctctgctgagcatgtgtgccatctcctctgcaccctcctgttatcctccctccttaggcagagagaaaccctcagtgtctactcaggaaagcaccagctgctccaccctgggcaggccgtgtagggtgcttgtccttggggggttatggctgcagctaggaaacaccagtggagaaggaagcccaggccaagtgcagccttcccactgggagaaaagggcgacctgtctccagcagctcccaggaaccacgaccacagtaacacaagcactgcttcttgtcagacaggaaagtctgccaggagggactgtgttatcctggtctacattgtatcttaagcctctgacacagtgtctgaatgattttccttaaggcatagtttgtgttttatttctctctacagttatctttatctagtgataatttaaaaccttgacaaatctgattttgacttattcatcttttcatacagctgatgggatattctggatgctaatattttgtttaattttattttattgacattagagtagaaactgtaccaaacgctctcttttacaattgcattaactaaaacatgtatataataagctaaacatgaaattagatagtttttcatttcctcttatgcagttagnnnnnnnnnnnnnnnnnnnncctctaccatgtcttcatcatggggacgtcctttcgaaaccatgttttggccccgcagttgtaggacggccactgtcttcagcgtctgagtgactgctgggtcccgcagtcgcagggcggccactgtcttcagcgtctgagtgactgttgggtcccgcagtcgcagggcggccactgtcttcagcgtctgagtgactgttgggtcccgcagttgcagggcggccactgtcttcagcgtctgagtgactcttgggtcccgcagtcgcagggcggccactgtcttcagcgtctgagtgactcttgggtcccgcagtcgcagggcggccactgtcttcagcgtctgagtgactcttgggtcccgcagtcgcagggcggccactgtcttcagcgtctgagtgactgttgggtcccgcagttgtacggcagccactgtcttcagcatctgagtgactctttgttcccagggcatctttctattcttggctcccccattgtcatcactgcctcctcctatggcagcatgaattctacaagggctctcaggcccttcagcttccctcctttctggcagcctcattcagagtccatagtgcagagttcaagctcctgtcatttctcacccagttcacgacagtggccgctctgccgccctctcttcctgctccctccatcatgttttgggtgtcacagcctgagtcatgtttatgaaatgtaggtttgatatggttcgttctttggctaaaacttcaaaagattcccattgctctgtggcgagccccagcatcttccttgtgttccacgggtgctttgctcctcatgcgtttttctcagactgctgtcttctgcactcttggtgcttggccacaaagacttgtcagccatctgtggccaccacagcgcatcctgcctttctgtctcaactcttaggagagatgtaacaaaatgtgcaggtagatgtcgcctcttccactgaaatgttagcttcttggctttgaggactctgtttaccttggtattctggtgccctgcacagggtccatgctcagtgaacactggtgagcacatgagtcaagccatgataaccgtttgcttaggtgcctcatcttccacgagacttccsacgccctggaggcaggagctgtgccttcccccttcctttgccccatgctgctcacccgcagtagatgggggacagcctacacaagaagccaggaggatctgaagaggactcaaatgaaaataacrcacagtttgtgtgggggaggtggacttatctttaataaaaatggaaagtttgcagtgctctacgggataagtgctctggtagcgtagagactgtagcaggctatgaaaggagtgcacattgactgacacccgctgtgtgttgggccctatgtactaggcactgactgaacacctgctgtgtgttgggccctgtgtactaggcactgactgaacacccactgtgtgttgggcaccatatactaggcactgactgaacacctgctgtgtgtcgggcaccatatactaggcacttcttgcattgtcgtattgtgacttgtggttttctctttttttggtgggctataacctgttactttccttgattgacctttacattgtctcctctctgtctttaagctttaagctggcctctctgtcgtactatcatgaacccatcatttttttagtattttttgtttttacttccacagacagatgttccagactcatcttgtactttctttgctccagccctgggcttggctctgggttccttttagcaaaaaatgctgtttagaagtcaggttctgggagctgggcttgctcatgtgtattgccatacgctgtttccaaatccctgcagtgaacagagtcaggccgcgtgtgtgtgtgaattgcatggatgggtggatggatgggtgggcgggtgggtggatgagtgggtgaatcggatggatgggtgggtgggtgagnnnnnnnnnnnnnnnnnnnnaatcggatggatgggtgggtgggtgagtgaagtgggtagatgagtaggtaagtatataggtggatgggtagatggatgggtggtggatgggtggatggatgatgagtccaggggtttcttctagttttttgtttccacattgtaactccttccctgacagtgagaaacggatttatcattacactgaatatgtttactgatttgagcaaccccttaccttaccagcctgtggccctctttacatccctcagcatctcacctccccccgactgttctccttcctcactgcatgtgggctccagcccagcacttgtttctgtgccttcccgggaggttctaactgttctccttcctcagtgcacgtgggctccagcccagcacttgggtctgtgccttttcaggaagttttatctgctctgcccaggcatgtgtgtgcactgtgttgagaaagcaggacagcaacacattgaactgcccattctctagtttttaaaaatggtttcctttcatgagggttraaaatctcatatttgttcactttgtatacattagccaaagctcatagtgtgataagacaaaaacattaggcatttgataaatgctgattaactgaacacatgaattcatcattgagtgaatcaatgcaggacatattagagctacttaaatctttagcccaaaaaatagccttttagatgagtatggaatagtatttggctttaattgatttaagagaaattatcatcagaatatctcaaattctccactagtgataaattttgcttgatgagcagaatttttgcacatctgttgtaccagactcctctgcccgtagaacagactgaattcactgtgagagagcctttatctttccatagaaaatactggataaatacaggggctgacacaacattctttacatggacttccatctcctcaaattccgctagtaccaaactcctcttactgtgaagccaagggaagaaaccactgaagggtgcattgccttcctttctaaatctgttgttcagtaaacaaaataatccctgtttaaggtgatcgcctgttgcatctgtcattggttggggattagaaataaacacagtctttaaagagattataatcagaagtgggaagtcatagatacatttgtcttctgtctctttccctatattttgcacgtagtaaataataaataatgatttactcaagatgtgacttgctgttctggtatcagagatactatttttggtttttaaaaattaatttttctaaagtaacctcaaagttaatgaacagatttaagaagctggctgggcatggttcgcctgtaatcccaccactttgggaagtcgtggcaggcagatcacttgaggcaaggagtttgagaccagcgtgggcaacatggcgaaaccctgtctctactaaaaataaaaaaaattaggtgggtgtggtagggcacacctgtggtacaaactacctgggagactcaggtgggaggatcatttgatcttcaaccaggaggttgaggctgcagtgagctgagattgtgccactacactccagcctgggcgacagtataagaccctgtctcaatacaagcaaacaaaaaaaggtagcagctcaggctacagttcacacttatgacttctaagttatataaccagatttgtgctaatgttactgttggtgctgatgtgaaatataatgcttttttagtacaatactgttgataactcacactagcatgttatgtagaattmtgtaattactaaaactgcaccctgggcactctcccaccccaacaaaaagcaaatcaaatataacggtaccacataaggttcattaacctgtggaaatgagcagcttgtgtatgatacaatttagggagggatctgttttggttgaatattcagtcattcaggcaacagttttcttaagttaaagtcaataatttgttttgttattacaattacaaaaattgtttcatagccttaagacagagacatggtctgaaacacacagtatagagagcagaattttcataatggatcaatttaatatgtttttaattccaaacaatataaagaaaaatgactgcttctgaggcttaatttccatctcacatgaggcgtctcccccgtcctttggagagaggcagatgatggtgtgtttccagaggcgcaggcgctctgctgtcttcacagacacgtcaggttactgctgcgtgtttctagatgcaagaagaaaaccagattgccaagtttccttgcattctttaatcagtcatcatttctctttcaagttacattcttaaaccttagctttctggataaaaaatcataacaattttaaagataatttatggatgctaataagctgaaacaaaattaaatggattcttgaacattttaaagtatctgtgttacttgtatttgcataatttcatttaatatacactttgaatcattttaaggatgtttgacatgctaggttgtaactacatgtcctgtttttgtcttaaaactgagtttagtgcattaaaaaaaaaaggaactcaatatctgaatctactttttataaaatgaaatttatagatatgtcagggaagatctttgtgtaagtgctaagactgaataaagtgtagtttaattattttcccccttaaaatgatacaagtagttcagagaatataaaaatatataaatttagtattaacaccgtaatattagttttcaataataaaatggaagtttccttggctggaagtcctagccacagcaatcggacaagagaaagaaataaagcacatccggattggtaaagaggaagtcacactgtcactgtttgctgatgacatgatcgtatgcctagaaaacactaaagactcatccaaaaagctcctagaactagtgaatgaattcagcaaagtttcaggatacaaaattaatgtacacaaatcagtagccctgctrtataccaaacagtgaccaagctgagaatcaaatcacaaactcaaccccttttataaaagctgcaaataaataaataaataatacttaggaatgtacttaaccaaggaggtgaaagtcctctgcaaggaaaactacaaaatactgctgaaagaaatcatagatgacacagacaaatggaaacacatcccatgctcatggatgggtagaatcaatattattaaaatgaccatgctgccaaaagtaatctacaaattcaatacaattctcctcagaatacaccattattcttcacagaactagaaaaaaaaaatcctaaaattcatatggaaccaaaaaagagctcgcatagccaaagcaagactaagcaaaaaggacaaattgcacggtactggtataaaaacaggcatatagaccaatggaacagaatagagaacccagaaataaagccaaatacttatagtcaactgatatacaacaacgcaaacaaaaacataaagcgagtaaaggacaccctattcaacaaatggtggtgggttaattggcaagccacatgtagaagcctcatctctcactttatacaaaaatcaactcaagatggatcaaagacttaagtctaagacctgaaaccatacaaattctagaagataacattggaaaatctcttctagacattggcttaggcaaagacttcgtgaccaagaacccaaaagcaaatgcaacaaagacagatagatagacgcgacataaactaaaaagcttctgcacagcaaaagaaataatcagcagagtaaatagacaacccacagagtggaagaaaatcttcacaacctatacatctgacaaaggactaatattcagaatctacaaggaacacaagtcatcaagaaaaaaaaacaaacagtcccatgaaaaagtgggctaaggacatgaatggacaattctgaaaagaaggtatacaaatggccaacaaatatatgaaaaaatgtgcaacatcacgaattatcagggaaatgcaaatcaaaaccacagtgcaataccatcttactcctgcaagaatggccataatcaaaaaatagtagatgctggtgtggatgtggtgatcagggaacacttctacactgctggtgggaatgtaaactagtacaaccactatggaaaacagtgtggagattccttaaagaactaaaagtagaactaccatttgatccagcagtcccactactgggtatctacccagaggaaaagtcattgtgcaaaaaagacacttgcacacacgtttatagcagcacaattcacgattgcaaaaatataaaaccagctcaaatgcccatcaatcaacgagtagataaagaaaatgtgtgggggggggtatatatatatatatatatatatatnnnnnnnnnnnnnnnnnnnntatcattttaagggggtatatatatacacacacacacaccatggaatactgctcagccataagaaggagcaaaataatggcatttaaaacaacttggatggaattggagaccattattctaagtgaagtaactcaagaatagaaaagcaaacatcatctgttctcataagtgggagctaagctatgaatatgcaaaggcataagaataacacaatggactttggggacttgggggaaagggtgggaggtgggcgagggatgaaagactacacactggatacagtgtacactactctggtgatgaccttctgtaaagagggtcattgctcaggggaaaagaccttaccaggtctgtcccacctgggggaaggaattctttcactccaaccccctctagtcttcctgtctcactaatggcatgggatatcatggggggagctgagaaacacttgtgaagggtagagtgcaggggcacagacccattaaaaaactgagatttaatcataagattgtagcatgctcctccttccccacaccttgtctgcacaccatcagggctcagtgtgataaacatgagttctctgtgaaagagcagcaaggtgtagaatctctgaggaaagcccaaagtcaggggcataggcaaaaccaaggacatgagaggaattggcagcccctaacacctacagctgcagcagacattgaacacagaccagctcctggcaagatgaacataaagccccacactaaaggcttgtttacttcagctcctattatctcatacatcatatccagctttcaacagacattccaagatatgctaaaaggtgggaaataagcagtctgaagaaacaaagcaagcatcatagccagactcaggtatgacgcagatttttggaatgaccagatagggaatctaaaagaactgtgatgcacatgttaagggctggaatagaagaagtagacaactcgcgaaaacggagagataactgtaatcagagatggaaacccaaagaatcaaaaggcaatgcgagaaaccaaaatgatggtaacagaaatgaagaatgtccttgaagggcttatttgtagacagatgtggccaaggagcgaatcagtgagcccaaagacaggctagtgaaaagttcccaaactaagaagcaagaagagtcaaaatggaaaaataaaaagaacaaaacatccagaactgtgggacaatttcagaagataaaaatatgtggccgggcacggtggctcaygcctataatctcagcactttgggagttcaaggtgggcagattgcttgagcccacgagatcaagaccagcctgggcagcgtggtgaaaccccatctctactaaaaatacaaaaattagccaggtgaagtggcgcacacctgtaatcccagctactctggaggctgaagcaggagaatcacttgaacccggaaggcagagctttcagtgagccgagatcatgccactgcactccacctgggcaacagaggtgttgtctcaagaaaaaaaaaagatacaactatgtataatggggatacctggaggagaagaaagaatagagcagagtaatttgaagtaataagtctgagatctttccaagacactagaccacaaatccatgaagctcagaggacaccaagctggttaaatgccataaaatgtacaccctggtgtataatattcaaactacaaaaacactgaaggcaaagagagaatcttgaaaagagccagagaaaataaaagcattggcctgggaaaggcacacgcatgacacttcctgtcacagtgaattacccagaccccacacatgaggccaccctcacgagaggtggggcttaggtgtgtcgttacagatgttgatgaacaggaggaatagggtacaaggaaatacagttgaccaatgagcagcagagggkttagaagtgctgacccctgtgcagtcaacaatccacgcataagttttgactctccccaaatttaactactaatcacctactgttgactggaagccttaccagtaacacagaccgtcaattcacccacattttgtatgtaaaatatatactgtattcttacaataaagtaaactacagaaaagaatgctattaagaaaatcataagagggaaaagttatattcacgcttcattcagtggacgtgatcatcataaaggtcttcatcctcatcgtcttccaattgagtaggctgaggaggaggaggaaggaggattggtcttgctccctccttggactcttgcagttcaaacccttgttgttcaagggtcaactacaggtaagtgctggtgaaaacaagagtggatacatcaatcttggaacagggttacaggaagagtgggagggagcgagtagggaaggttctgattagactgggggaatatagagggcagtttatttagacgaggctagaggccttcagaatccagaaataaatggtaaacatgggtttttttaactttatgaaaggaaaaacttctggatttaacacattcaaataatttagaaatttagaatgtgaaattcctctcaccgttgacctttttcccattccgagttccatgagcagtgaggtgtgtgtcagcgtgtgctcctgcacacacatttacacccgtgcaggtgcagccacaccttttctttgcattcatctgtcatgttgaaggtagatcgctgcctttgctccacgagacttcttcctgcgtgttctgcagggacatccacggccagctccgccactacagggcatgcttgctgcgggcgtgctgctgtgggcttgcttgctgtgggtgtgcttgctgtgggcctgcttgctgtgggcctgcttgctgtgggtgtgctgctgtgggcgtgcttcgtgtgggtgtgctcctgtgggtgtgctgctgtgggtgtgctgctgtaagcatgcttgctgtgggcttgctgctgtggctgcggtttcgaccatgggtttgtgtggcttagggagataatcaacggacggtatttggtttattgtcacgttcagctctatgtataagatttccttggttcagcttttataaaaatgtttgtattataagcttattgcatattatttatttattttttgagatggagtctcactctgtcacccaggctggagttcagtggcgcagtctaggctcaccgcaacctccgcctcctgggttcaagcaattctcctgtctcagcctcccgagtagctgggactacaggtgcccatgaccatgcctggctaatttttatatttttaatagagatggggtttcaccatattggtcgggctggtctcgaactcctaacctcagatgatctgcccacctcagcttcccaaagtgctgggttggattacaggtgtgagccactgtgcctggccttattgtatataacttcatcagtctctcattttctgaagtttcagaaatgttctttattttgtagcttataagacattaagtccagttttactccaatttaattctcttgtaaaataaccttcctccacatatcatattactaacactttctatcgtaagccatagagcaatataaactagactcccattcagctgtgaagcttttggtcagtatttgaattttacataataacaattataatacttgttttctgtgacactttttggtttttgttttttatattattgacggtcagtatttgaattttgcgtaataacaattataatacttgttttctgtgacactttttggtttttgttttttatattattgacaacagtgatgaacaaaagtgcacacgttttaaaacttgtactgctcagttaaacatcataaaacgagcacccactcatggtgcgtcacacttgtcaagaagtagaattctcccagctcccgggagtgtcccctcctcaccaaggtgaccaccatcttatctagtgaagtagaattctcccagctcccgggagtgtcccttcctcaccaaggtgaccaccgtcttcttatctagtgtgtagtcataggcatatgtgaagtttcccatcgttgtgtgtcacagcacatttttatatcgtcttctgttatatgaggaagccataattgtatgcagccacggatttctacatctttgatctctgggttctttgggctttttgctcttaggaattcctctgctctgaatggtgtatacagatctcttggtgcagtctgcatgcctcctgtaaggtgtgtaccgagcgagtggtattcctgggtcgtatagcgtgtctgtattcatttcacataattccggtcttctaaaattgttgtactggtttttactcttcccagccaagcaagagaactcaagtttctctataatcttgtccacacttgtagtgtctatcttacgttattttaattttagcattctagtgagtatgtggtgatatctcattgggtttttagttttcattttctggatgaattatgaggtttgttcctgtgtttatcggcatgggtgtctggacgtcttggtttgggaatttcctatgaaagtcgtagctcattttcccattggattgttagtctttctggctgttgtataggagctctttgtatatccgggttattttctcccactctgctggttgccttctcactttgttcatagtgttttgatgagtagcaactctcagttgtaacattgtttatcaaccttttttttttatggtttaagaactatttctgcactgtaggtcatgaagatactctctcatattgtcttctgaagttttattgtttcctttctgttacatttctaaacatctagaattggtttttgtatataagaagaagtagggacccagttttctgtttttcccctatgtggatttccagttgacccagaagtgattgtcgaaaggctgccccttccccactgtgtgcacggtctgtgcaggagtcagtgtccacacctgccccttccccactgtgtgcacggtccgtgcacgagtcagtgtccacacctgccccttccccactgtgtacacggtccgtgcacgagtcagtgtccacacctgccccttccccactgtgtacacggtccgtgcacgagtcagtgtccacacctgccccttcccccttccccactgtgtacacagtccgtgcacgagtcagtgtccacacctgccccttccccactgtgtacacagtccgtgcatgaatcagtgtccacacctgccccttccccactgtgtacacggtccgtgcacgagtcagtgtccacacctgccccttcccccttccccactgtgtacacagtccgtgcacgagtcagtgtccacacctgccccttccccactgtgtacacggtccgtgcacgagtcagtgtccacacctgccccttcccccttccccactgtgtacacagtccgtgcacgagtcagtgtccacacctgccccttcccccttccccactgtgtacacggtccgtgcacgagtcagtgtccacacctgccccttccccactgtgtacacggtccgtgcacgagtcagtgtccactcctgctccttccccactgtgtgcacggtccgtgcacgagtcagtgtccacacctgccccttccccactgtgtacacggtctgtgcatgagtcagtgtccacgcacagtgggtgcacatctgggccctttcctgtgattggtctgctgatccctttctttgctaataatttttaattgctgtagggagttagggattgcatttaaatgtctatagatcttcagagataattaatttttataatattaagtcttttagtcaacgaatattgtgtattcctttatttttcaataatgtcttatgattgttctctgtagaggttggtataccttttgttggatttatttctaagtatttgactttttttttttttkgggggggtgggggaagacaaggtcttactgtgtcacctgggctggatttcagtggcatgatcactgctcactgcagcctcaacctcctgggccaaagccatcctcacacctccgcttcctgagtaactgggagggactacaggcacatgccatcatgcctggctaattttttatttttttgtagagactgggcctcctgtattccctaggctggtctcagagtcctggcctcaagtgatcctccagccatggcttctcaaagtattggaattacagatgtgagccactgtgcctggctttgacattttttgatgctatttcaattattatcttttagaaaattttatattctgtttgctgctatttaaaaataaaaaaaaawttttggtgatgtatttttatttttaaaagtaggaaagcattttatttccaaattgattgcctacaataaaaaygttgagttcatatactctgcattttaagtacagatcctaatcagatgttgagtactgtcatgttgaaatttaccatgactggataagtgatcctttttttttttttttgaatgagaacattggcaactaattccacaataatctcgtgactgctgttgtccgaatgctgctgtcatctcaaggctgtggggaggtcagttccggggcttacgtgaggtggtgattgtgggcatcacgtctccggtgcaggccaggaacacatcaggagcatgtgcagggcccctgcctgggagcagcgtgggctgctgctgttccggccgggctgtagctggactctgaggaccaggttgcttctccatttctgtgccccctccgtgtactccctggtcttgggagggtgatggctcttaaggtggtcatcgcgattcagaccctactccagccccgttctgcgctctcctcaattcgccatggtgggccctgctgtctcggcagctgtggacacagcctgtggcgccccggcctgtcctgggccctggatttcacgcttcctgtctctaccctaactcgagctatggacaggcagcgagtatgattttcctcctcctcctgctgttggggtggtgatctgtggtgatcatggaggaaccgctaatagatttccaaagagggaaatatctgcagtggccacatgggcagtgacgcggacgcagtgaagcggatgcagtgacgcagacgcactgcttagatttcagagtaagtgggagaatcagaaagaaccaagtcaggtcaaaggagaaataggtatatttttatcacgtcagtaagaacgagaagacggtcacaactggcactgaaattagcagttactgtttctctgcttcatgcctcaggtaggcaggctcaaggagagcctccagccactgagccccaacccccagtcatcaaaacaacggggtcaactgggaaggaaggatggcgtctcaggcagagaacagatgtgcccagatccaaggtgggatggtgtgaaagagctgcagaaagcatgcagggaggtgtctggggcgagacagggcctggccctggtggactgtggactgtggaccaccgcgtgtgccccttcagccctcttatttccaccgctccacaattcatgacaagtgctgcatcttgaaaccaaaacagagaggttgggaatttacaacaaaccaaattaaatgatggtgtttcttgcagacactgtgagcccacccatggaggtacacaaaccatcctcataaaaccaagccccagagtgggttgtggtatgagcaccgccagccaagtctgctgtggcagggacagggacgtaggacgatggtgtcacggcacttaaaattgtcttcagaggatgatttccttcaacctggagtcattgtgccgccattgtctagcattgtgccatgctgcttgtaaaaagaaatggaagaaaaatcagcttccctgcatgcatcattgtgcaagaggtagctgaggaccagggcttatttcaggcacttgactgcagtttcttttatcatgtaaatttctttcatgtaagttacatgatagtcctttaggagtaatgtgttttctcaccttgctgttttctcgagagcattgttttgtgagggcggttgatcatcagttaattattacacggaggcgttactgaagaggcatctgaatgtggctgggagagcatggttcctgagggctaagcgttcccaaaggatgagcggagaggcttgctctgcctgcgtccccatcagcggtgaccagcagatcaccacgcctcaggggccccacacccgcggtctcttcctagagctgcagtcccaagcttgcctgcgctctctggaaccctccagagtgttctcagcgcagcccactttggtagcacaggaggagagccctccagctagaaagctccagtagaagctggcgaagtgaggtgagggcattgtcctcagtgactttgctggactcaatattcccctctgttaagggcctactgccttggtaggtcatttggattacaacattaaattatttcatgtagtctcttctccttttctcgaagggcagtaattgataccagttgagcaggaagttttatcacatccaaatgaaaatggtagaagaaaaaaattttaatatagaaaattcagcctgttttatttcatgagctttaccacatccaaataaaaatagtaaaagagaaacattttgataaagaaaattcaacctgtttttatttcatgagcctaatggaagtttgagtagttaatggaaagttctggccggacacaggctcacgcctgtaatgccagcactttgggaggctgaggcaggcggatcacctgagggcaggagttcgagaccagtctgaccaacatggacaaaccccgtctctactaaaaatacaaaattagctgggygtggtggtgcatgcctgtaatcccagctactccagaggctgaggcaggagaatcgcttgaacctgggaggtggaggttgcggtgaagccgagatcgtgccattttactgcaacctgggcaacaagagcgaaactccgcctcaaaaaacaacagaaaaagaaggttcaaccagagacatccaattttgagaataaaaataatgtcacttctaaagcatactagtgggccctgggaaccttggcatttggcagtgtcgggccaaggatgcagaactgaagttggggacggggagctgctcggtctccaagctgccatgagctgtgtgttcttgaccaaacacctaacctccttagaagtggaatagacatagtaagacctggcagagttaggaaggctgaataacagacattacacagcagcacttgttaattgtaaagggctattgggttgtaagctgcttgtggtcatgagggtggaaaaatgaatcacttataatttgttaataaatttaaaccaaaacttaagctgttttatgtattagttattagtgtggagttagtctcatcaaggtaaatcagttatgcattgatttttttggttgtctcaagcattttgactgcgtttttttctctgtgtagaacatggacagatgggtttgtcccgtgtgagaattccgcagcctttccattctcttgctgcccctcctctgttatggcctcgctacctagggtgatacttaacatttgagcaggaagtcttgacaaacgactctgagattttcaagcttttcttagatcccccgtagtgtgaggacccacagcttctctatcgtctgtcttgagagatgtcgttctttctctgtggttcttctggcctccgtcgtcagccagggtgctgatcaggttccatacagagtctcacttagaaagtggctgtttctagctctaactacaagcagcattcatccaaagttagaacctgttgactgtattttgccacaagacaattcactaattactagaattttagctccttgagtttagggcaaccttttcgtcattatgcagcatgcctgtttttatcagctaatatgtgtaattacatttagaataagtgcactctaagtgctttaayggtattctgatattagtgttgtgacctagcagttgtcttctgctggctgaataattagtttgtttctaagagctttagagtttgatagtcgccaaacacaagggcttccttgtggaaggttgatggctcccagtgacccttcgctgccatctggcacagattcaagggctgctgtcatctgctgctaattgctgtcacctgcrctttggagtccctcagcactgggatgctgctgcctttagagcgggcccctccttgggcccacctgtgtgtgcaggagagggagcaccgccgtgggcctgtggtctcatgcaggagcattttcagccagtttttattttaatgcctgaggtatgaaaaatggtgaccattttgcgagggttattaattcgctaaatccaagcgttttgtctgttttatgatttgttttaatggttctcattcttagtagcctgtttaggctggcaagattgtttccacaacattttacggaagacttctttaatcctctttcgtaaactgataagccatagtcagggcactagcctatagcaccatattatattaatgtattttacttgtaatttagagaacaagaagaatatcctgatttgaagtctaaactgtcccccgtggcactgcacagctgataaccgcaaacgagaaagatgtgtatatcaaatagtttacaaaatgaagccagctgtgtttccctacatactgtggcttcctgacatgcatcattaaaccttattagctacttccttttacaaagattcttgtagtcttgaacattgcatattaacattttctgcccctccaactggaaattatttgctttattgtagagtgtcaacttgctctagtttctgatgcgttctaattggtactttggagtataatcatcgtgtgataccacgccatgcatttctttatttggaaattaatacagaccttttcactttatctgtcaatctgagcaactttttacacarttctcaactcttgggattgcttacaagccattaagtatgaaatggctcataaagtgtctctgaagacataaagtaacacaaaaattttagatggtttaaaataatgttgcattttgccaagataccagtaataaacctcttagacagttttaataataaaagggtgattatgcaagatgaaaagtttatttaaccatattacctttatcatttaaaattctcagcaaatctgccagttcattttccttacaaaagaatacaaatcctaacaaccatggatttttgaaaacgatgtaattcaaagttagctattagactgctataactatccttcattcttctttctctttctttgctattctatgtctgcaattctgctattctgccttaaaaattaaaacgtttacctattattagcttctggttaatagctagttaagcagatgtgtgggcggaacagaaaatgtacagaacctagtgactttgttcacgatgatagtaattctgaggtgtttcagacattggtcagcattttatatatcctcatgtttttaatataattataaataggtgaatatgcatttaattgcaaggggaatgaaatagaatactgattgtagttctgatcagcaaatattttagtcatacgtcttgtcaagacagctaatggctcttgatttaaaaatagtgttgagtagttttacatagtggtaggtgccagatatctggagaatgggatggagatcttccagtggcttataaatccccacatatttacacaataagccaagaaacacagaaggagagtgtgacatgttacttgacagtgacagccttgtgtccttgactaggtcctgtaacatctcttctgtgctgattctgatacacctgtatgtaggttatcaaggtggtggaaacatgctgaagtcagctggaccacagttgagcacttaagcattaaggaattttcctgatcattgtcattttgtggtggtttctaagatactgttagaagaacaattagcaacttcaaatgctatgtttagtgtttcaagtagccttaatgaaaccagactttctggaatctcacataaaaatgtttttcactgatactgtttagtaaattcccttgcacaaaccattaaatatgttatacttgttggcatgccaaagcaagaattcggatgccaacattttgaaattaattactgaagaaatttctcactttactgtagaaactaatctgtatcattacctcttaataaagataatctaagttggaaattaaagttttaattataaaattagtgatcttgtttactaataatcatttaaccattctcttttctaaaattttataagagaaatargcaggtggaaagtagtctccccactaccccccctccgccccctctattctccgcagtttctttaaaaacacagttttcatggccatgttccaggcaggctccatggaaggagggctaggctggtgcctgtctgctgggccacccccctgccctcctgtgcacctacatttgcaaggactcactttgcttgtggaaaggaatggtcccatctatttttctcttctgaatcacagccttttcccaccatctatggcccaacatttccaaggtacttactggaataatttcttcaatatctcacattctgaacactagaaacgcatcaactaattttttttttaagctccttgaaaagagttcaaagctctttgaaggaaagacagaccttgtgcttgggaatttcggaatactgtgacattagaagccctgaccacatatttagtaactttcttcatgagtttttaatagaatctgatgacattttagtactacacaagattttttgttcagcaacatattttgtaaattatactgtaatgaatatttaaaagtatattttaagagtgtttctaccctaccctgagatatttaaaataaagacttgctacattcagggtaaaataaaaaggcagatacctcccagaagaaagatttgtaaggagcatagtctcttcagtgtgtactattagaaacagactgagaaaatgaaaggagatgcgtgctctgtattttaaatcattttaaagaaagccatggtcttccctttcttaccatgtctcttaaagttttatgactcctagtaagagactttcttttacaatatcagtaccacttagagttattattagaatagaatctattttttatatgctttggggcaagaagtatttgagtgtgtgccttgtaaagaagcatgaagcagtcagaactcctgggctcctagggaccctgaggtccagtgacctcccaccccccactgtcaggatctgctcttcttggagttcctgcagagcttgctggcttgtttgtaaaatacaatgagagctttataacccccctaaagtcctgggtattgtgtgtttagatagtaagggttagagaataggttcatgctctttgtaaaatacttgttaaaataaatataaaattacccaaataaactgtgtattagactgaaaaccaaatgccacttctatgaatgatgttgcatgttgaggtttctggtgttagtgggtagcttacgttattgaaggaattattttaaattggtggctggtcttggcaaaaccatttaaaattgatgccttcctacattaagacaaaaaaaacagtaaatctgttcaggatcttgaaatcattaaggaagctgttgttacaatgttatcaacttagtttttagctctgaaacttcgaaaagccttaggagggcaccaccctactgactgaggagggcaccgccctactgactgtgcggagggcaccgccctaatgactgtgcggagggtaccgccctactgactgaggagggtaccgccctagtgactgtgcggagggcaccgccctactgactgtgcggagggcaccgccctactgactgtgtggaggacaccgccctgctgactgaggagggcaccgccctactgactgaggagggcaccaccctactgactgaggagggtaccaccctactgactgaggagggtaccaccctactgactgaggagggcaccaccctactgactgcggagggcaccgccctactgtctgtgcggagggcaccgctctactgactgaggagggcaccgccctactgactgtgcggagggcaccaccctactgactgcgcggagggcaccaccctactgactgcggagggcaccgccctactgtctgtgcggagggcaccgccctactgactgaggagggcaccgccctactgactgtgcggagggcaccaccctactgactgaggagggcaccaccctgactgtgtggagggcaccaccctactgactgcgcggagggcaccaccctactgactgcggagggcaccgccctactgtctgtgcggagggcaccgccctactgactgaggagggcaccgccctactgactgtgcggagggcaccgccctactgactgaggagggcaccgccctactgactgtgaggaggacaccgccctactgactgtgcacagcatttccgaggtcctgtcttgaaattagggcatcttacgagatgccagatttttattcagggcccccttcctaccccccataatccaggatgttcaagtatgtagattctggccagcattctgcgtgacaaaacataaatttagggtaacgctttttgtcagaaataaataaatgagtgagtgtatgtgatgtgctggactggttgggttagaaatggctggcgctttccagagagcgggactgcagggatcaggacgcgcgccggcctcgcgctccccctgctggccgcgccccgcgctccccgcgctccctggcttcccctcccagccgcctatgggaggtgtgagtacgactctgagacagatgactctgagacagacgtgagcaccgcagcggtgatcggcagtgtagtgactcctacacttcagcctcctcctcctcctgattttcagttaaacaatgtggtgattgtaaaataagattaggaatgatgtacattagaaaatggataggcttatcttaatattcagtgctggatttttaacgtaatttctatacgtagagcaaaaattaaatttccagatagtttctggatcattttgcatgttatcacatgcatatttttgttttaaatatggctttgatgtatcacaagttgagaacatttgaaagaatttataatactaaaaataaaagttttaacttactacttaccttccagccactgtgttgctttgcatgtgctgacctttcatatattgatttactttgcgaaggttctaatatatcagtaaaggctgccacacactaacagatggaatccagttgtcctgtatgaacgtagacagtcagcatgagttttgtaagggcgagcatgagatgtgtatatgtgtatacatgtgttcagagatgatgctactttctgacattatggacaattataaaaaattctggtgagtggatacgtgtcctaggaaatgctagagccagtattgacatttctcaagcgatctaggagtccagcagtttgagaagataacctcattctgcactcatgaagcccccttcaaacttagcaggtaatatgcttgcaaattttagtaataattttatccttaaaaacatgtttatataggtcggcggacagagtgacaatcaatatgcatagtctgtaacatcaaaagttgggtagctccagtttgtgtaaactaggtgtgagggtttactttgaactcccttgtctcttaattacgtgtcatatgttggtttcaaacgtggttttgcttccctgtttagtagctgattcttgcattaatacttttcttatttatacaaaaaatatagtacttttttatgttaatgttcaagggaaaacattttatataataactatatagcaagcaagggaaaaagcttaaattctgagtatagaataggcaaaatgttaaatttcttggtaggcaaacatgtaggttatgaaataattctttcagaatagactttaaattgtctattrtgtaaatacaggttttgatttttaagaactaaggtgataaattgtaacattaagaattgttgtgctgatacttatttagggaattcttaaagcacagattattgagccaacagactataatggccaaaagaaacccttcttatttcgcagatcactgaggcgataaacgataatggctcagccacatctatagtgtgcggtcagcctgcatgtactacacacacttaaggcttagtagttcatatccaaaaaagaataataaacttcagaaggaaaaagactatgtagcatcactttttaaaaactaatacttttaatttaaacttcgtaatggaaaagttgttgctctaaaatttagtacttagatttagtgcatgagtttcatttatttgaaatgcagaaacacaaatgaaggtctgaaaattacttatttttttcttgtctcttaagattctactagcagtggaaaatatagggcttatttgtttcaaagatacttaaaagaatatgctttttataggaatttcagttaggttaatgcatagccctatatcagttttgtagtcagggtccaaattcgaaatgaagaactgatccacaaatagttcagctgatgaaagacaagcagtgttaacagttgtgtttttctgtacgtagtcagccatgtacaaagctgttcttctctgctagtgcagagtagcatgaatgaattgggtgtcagagtcgaggcttttcaaattgtcctatattcacagggaaactacaggacaaactaaaataatttagttttctgcaagagtttaaattggctatttgaagttttgcattttactattctaaactacttctttgtaaggggtaagtacgcgtgagttttaaaagatgggtgagagtgtttggatgccgacatcctgttcacccagggtgacatcatcagcagtaagtgttgcacaggcactttgttgaatcatggatagggcctgagactttacagcattcgacgtctgctccaatttgccgtgtacattgattgcttaggaacttagtagtatgatgtgagttttaattttgagatggtttgaagtgttgctgtgtcatggagataaggtctgattctcactcgtccgagcattcatttaaaaaaaaaaaaaagcctgatcttttcttgattaagcaggagaataccgtatttaccctttattgttggtataaaccattattttactgagaaccattagctatttaaaacttggtacataaattaaagaggagctaaatggatttgtgatcgttgccattagtagcattttagattatacaggcaattattgtgttcattatcctagaacagcccctttgcagaatcattgtggttgtcttagacattatgcacaaattttcccttggagattaaaatttgcagtagcatatttaattttgttattgcagttgtttcaaataaatattatgacaagtagaagaaaatttgctttactaatataggagatgacaatgaatgttgaaaataacttctaagtgtatttacattaccttttcttaaatagtcgtaattacttcaagtgattaatatattttatgggtgaaaagtttacagtcatggcaaaagttatctggtctgtccaggtatttaagacattttttaaagaaggaagagatccacatcaaaactaaagttaccaccttctttatagaatctgtaactttataagttaactggtttttattttaaatagtttataagagttcagattgtattttagatcagttgaagaaaagcatgtttcagagaaattgaatattaaaagattattaattgaagtgggttaaaaaaatgcaagtgttgaaatgtgtcttttcttctgttttgttagaattgaaaaaataaaataaaataaaagcaacctacaagctttacactatatgctgtagtttggttacaagttatattccaggaacaacagtcatagttcagaaaatgccacctgcaaggcacagcccatccttgaaaagttatattttattccactaaatgttttattgctcttaagtttaaaggggttgggagaagacaacatatacttggcttcaaagtgattacattcactagtcaagcatctgaccacatctgtcttcatcaatgagaaaggtaataatgctttgatgatctgcatatcggtgtgcagtgggcggctttgaatgtttccatccaatacgtggcattttttgaaaggaaactttgtattcatttctgaatgtttttgtcctggcttttacagttcctcactgctatgttgcaggggaaagtgtgaggtggtggttatgcattttgcaagacagtgattctttattttattacaaaaaaagaccaactctggaaggccagattaaatcattcctttcactttttaatgggatttggatgaatagagtaaaatatgcactttgcattcattgatagcatctttaggttgaggtaattgagtcttttttccctgagtgaatgaataatgacttcatctgatcctcagtgaggcctgaaacttagaccgcctttgtcacagcaaaaggatctgggctttgaaacatgctctacttccctggcttaatttttcttcattttaatccaaaaacctatttttctcaataattcaagcataaactatgtagtagttgaagtagcggaaattgcacgatatttgtcctggttgtgctgctttttaaatagagctgataaatcagccgctgtggtcttcagctgccccattctcaagggaaggcacagcccatacccgcagcagcgttgggaacttcagaactggttgagtaccgctccctttccgaccatttgtgatctgggggagcggcgctgttactggtactgtggctgacccagagaagagaaagccccatgctggagctccgagatgctgctgtggacgttttacttggctagaaggggatctgctgctgtgaattagagggcagtgtgctttcttgggagaatatagagctgggaatgtgcagtctttgaagagtttctgttgaaaatgagctgctgtctgtgttgctgtattgcaacatggagaagagtttttgtggcaggccaagtgtctcattaattgttacattagaatcaagtcactatttcatataaaactgacactttgtgtttgaagtgtcctcaggagtcttacacagtgaagtggccaagtgagccctgtggcagtgtgcgcaggacagatcacaggaggggccgccccaccccgctgaatgcggcatcccgtctgtgttggtcatggaacccacactcggcacaccagtcccatggctttagggtccttgtcatcgctactgttgtgaaaggccatgaagtatttattaaccgatggtagtgctgactgtcggccacaggaagtgatttaaaacaagcctggttagaaaagaaaacttactattttatgattctgttttataacatagatcactggtgttcatcttatttctcctactagattagcttgtaggtaaaatcttatagttagcttattttcataaccttagagtttagcacaaaatgtagtagacatttcaatttatttgtttaattagttgacttttcttcgcagctgcacttaatggactttctgacaaagttttatttttgcttgataactgcaggttctgatgatctcatgagagtttgtggaaaatattaatcaaaaccagatataaactaaatatatgagttgtgggaaaaggctagctttctattgggcaaagttgcagatttttcaaaaggcactacaaaataaaccaagttatttattagctcagtaattctcaaactttattttttttaatcaggttttttgcagtcatgttttctttgtgtactccttttcaaaagttgttccagattcaggagaaattgagatggcagatagataactaacctgatagaatttagtcttccgctaatgtcacatagatcagaaataagtaggtaagttaagtacatgctgttccctgacctagtgatgccaaaggcagtggcctctcaccctggcacctctgccctgtgggtaccaccacttacagatgaggaaaacgaggtctaacaaagagtttaagggtgttcctcaagtcacacatttagtaaacagaggaagtggattccaatccaagtgtgtagtaagagcagtagcagcacacatggggggcgtactgcccagtaggaaccgtggccactgtgccatgcgctccctcttcgcatcccctgggggctgtaaggaaaacatcccagaatccctattttacagataagaaaaccaaagcccagcttgcccaaggttatgccgctaagtggcagggccagcatctaaattagcctaaatccagagtcccgaggaatcctagttgctgtgctgtgtcacttctcccacccttcctgcagcgccgagttccctctcatcccccagccctactcactggactgccttgtggtctttcagggctgaaagcaagcaaggagaaacagtccatagcgattgctagagctcgaaattgaagctacatgcttcagaagagctgtattctcttaacttgtgcagtgagagctgcttgggttgctagttctctctgtttccaagatcctatacagaatgcagccaaaaaattgaactgatgcttattgacataatttgccctcacagtttgctcagctggtaaacgatccatagaatggacttgcatgtagcgtgccttactgggagaacacacaatgtaagatctgtgcaaattaaaaaggttttattttaagctagctaactattgctttttttttttttttttctgtaagacaagttctttcagagagactgctggtagatcggaaagacatacatactgtcctgttcttgggaactctccatcttgagtagaatcctcatgggggaggtgcagaggcacccacacggataacagaggcatggtcatggcgtagcacatgcaaggaagacccgcctgcgccctcagaagtctctgttcccgggctgggccctcagaactctgtgttcccctgctgcgcgccgagcaagcttccagtgcccttctctaggcttgcgtttcactttgcctgagccggtgaccagcgcgccaccctccagaggccgtgtctgagttcactgcggctgtgtgctctggcccgtgttttgtcagtagaccctttctggaaatgctctggggatcatgattcatttctagaaattctgcctgaattttcatatttcattataataaaggctaataccaataaattttaaagttttttttttatgtcatcactaccatgcattctgatttataatattagggacattgtggttagcttgttcatgtattatgtgtttttctttcaggttggtttgttggaccttgaactcaatcggctgacgaaagcgctrtttttggctttagttgctctttccattgtwatggtaaccttacaaggatttgtgggtccatggtaccgcaatctttttcggttccttctcctcttttcttacatcattcccataaggtaagtttaaaaatgaaaataaaacaaatgtctggtttcattgagtatgattttattgaatttatctttctcagtatgaaagaaattacccaaacaaagctagagaagtaggagccagaagttctgaggaatcttgaggaattcttctgtggaaatgttgttgggggagacgtcatcagtgccggtagaatgatctagaggtgccatactttcctgatagtgaatgtgttgatggtgtcttcttcaacaatcagaagatatttcctgatgaaacataaaccagaatttcacaaaattagttttgttttttgctgatagacttttaaatgtccagtgccctttgatctgtgtggaatcactggcattttaaagttctrtttaatatatctaatatctgtcaagttagataaaatattaaggctgtgttttagtagggactatcatttcagaatgttaacctatattataactacagattggaatataaatagttcatattagatgcctatttaatgtaaagactaatattttaccatataaacataaatccattttaaactattttctaaaatattttaagaaagatattcttaatatatatgatttaaaattttcataggaatgagcaactgaaacctaatgatggataaagtatgaatctagaatatctaccttttgtaacagagaatggactaaaacggtatagaatgcttaggctcaaggatgtagccactttgaagagaaagatatctctatttctaaaccagctttctccaaaatttgctctaaaaggtgatgtctcttccatttacttacgtcataaagtcagagctataatctgttcttgggatgtgtacacactgcactgccctcacaggcagtcaccaggaatgaatccagttgctctcacccagtctgttcgagaggtaggaaatcagcctcctttctgcccgtcacagtacagattcctgtggatgctgccttccatggtgttgctggttcacgggtggccaggcctgtgcagagagcacgcagcaaatagcaacttctcattgcggctgtgtaacttgctgctgacatagattttctgcactccataaagctgactgcagagatggctgttccagcctggcttgtggattaaacctaataaggcccagcttccccgctctcctctcccaccacactgcagctatccccatgtgccagctgcttcccaccctagctgtgtcctctgcttcagtgctcctctacctcatcattccatggctgggcttgtcttgtcactcggctcttaccctaaatacctttcctcagagaggctgcgtttgtctgctcagtacagaccaagaaacagccagccacttgctatcatagcagcctattgaattctgtgtagatctctatgacattcatcttgtttgttgcctgtttctctcttctcactaagccctgtgagaatagaggccttgtatgtcccgtttgttgttgtgtcctagttaggacctagaacggagcacgcttgggatgtggtagggcctctgtaagtatttgttgaatggacccattacaaaggccccatcctgctcagaggacccgagcgcagattgtcacagttcttgtgccggcatgtattgagtgccacaggtggactctggagacacaatctttgtcctcaaaataccccccgcccactggctaagtggcaataaacaaactataaccagaaagtaacctgccttttttatctgactgtcatgccagaatttacttcttcagatgtgatggtccttcaggtagttctcatttgttgttcagcctaagcactcactttgatcccaggcccttcacacattgcatcttctctccaccagcttcctccatttgatgccacccactccccaagagtctcctttgtctccatacacatgaatgagccctaatctccattgttgtattgtccagtgtcgtgtgagaagataggttagccatcaagtgaaggaggagataagacatttcwcctgcttttcttagtttctgccagctggaatgcctgtctcaggcaaagcaggctgcagtgactgactcagatggaggagctgcttctgctcctagagctgcagtgagcccctcctgacactgcagccttgctcactcaaagaccttctgacgaatggggtcgagtctctggttctcagtagctccacgtaaggcacatagaggggcacatatgcatgtttgtgccagcttgagaacctgtctcaagggtggtgtatttttctcctgtggagcaaatgtattccaactcccaaaatatgttgatagacacttctgagatactgctttttgggttatattaggttatgcattcatttttattagagcttcatgacacagaacgtgtttgggattcttctcctgcaagttgcttccagagcctcatagcatgttgttttcgttaccacttgctttgtggattggtacatggtcattttataaatattccatgtgtgctttaaaaatatatatttttttacatgaagttattctataaatatccattagattgatctttaatttttaatatcatgtatgtgctttactgtctttttttwaaaaaactccttaactttttagttactgagagtgtgcaaatctgtcaccataataatgaatttgtctattttcccatgccattttgtgaattctagctagcwatatatatatatatatatatatatatacatacatagtgaggctatgttattagttgcctataggtttagaatagctcttattattctggtgaatgaaaatctcttataaacagcattagctaggtggtagtggtgttttcttaaatcccatgctaccatctttacacttactgtgattaatactttatttgcattaatttatgtcaccttgtttttgctgtttgttttacttctatatttatttttctttcttgcaatctttggagttttttaaattccattttttcttttaacttgaagtgataccctatatttctattattgtggtttccttagaaattttacatatttaatatataatatttagtaaagtttaaagttaagctttatctttactctcctctcaatcaatgctaagaccttaaaatattttaagtcagctcatcttccctctcccatccacttacatgctttatttagtcgacatttgctttcattttgctgtcctgtttggtttatactcagtgtttgcactagacctccgggccgcagccttcttggcattactgcagtagtcaaagggtgcttctagcgaatcatcctacatattcttgatcagtcttttttcaaaaaggataagggcttttagcagggtaaatttcatttacagaagaataaccttaatgattatgtttgaagtaagacttggaaaatacagtgcgtattattcacattcaatcctattgctttttatyttggccgggcgcaggggctcacgcctgtaatcctagtactttcggaggctgaggcaggtggatcacctgaggtcaggagtttgggactagcctggccatcatgatggaaccccgtctctacaaaaaatacaaaaattagcggggcatggtggcacacacctgtaatcccacctacttgagaggctgaggcaggagaatcacttgaacccaggaggcagaggttgcagtgagctgagaccgtgccactgcactccagcctgggcaggcaaaagaacaaaactctgtctcaaaaaaagaaagaaacaatacaaggcagcaaggtaagtgttgtcagtaaatagtcaaagctgatgcaccggcccctgctkacacagagcaaatgggcaggccatccagtgcccttggcctcttcttaattggaggggataggcataagcatttaaacgaaacagttacatagtggtaaacactgttagtaaagtcaaaccgggcactggaacagagagaaccttgcagggcttcagagcaatgtggggcttccctggcctggtgtttattaagcggcaggctgcatggtgaggccaccgtggaagacctggggaaaatgtcttggcagagaaagcacattgtcccagcacagcagagayggcctgtggctggcacaagtgcactccagctcagcctccccagcctccagcacagggcgcctgctcccatctctgtccagcaaacacatctttttctaggaattcctttttcttctttgctttcattaatttgatttttcttaatgtcagttgatttctttcagttctagaatgtcacatgatgttcctttcaagactgcttctctttcaccacgtaaaaggcctaatgagagctttgcttccttttgtatctagggcacctctgtctttaactgacagcattgaagagtattgagacttttattacattttagtgaaatattttatttatatggactatctccaaccacttctttctttagtaaaataacatagaaagatttgaccttttacctttatccagttgccaagaaaaattaattatagttatgaaaattagtttacgcaataagcattttttaactaaaactaatttttgttttcatacctcagtaattatatgtatttatagtaaaacaaaatagaaaatagggcaggctgatagcttgagtccaggagttagagaccagcatgggcaacatggtgaaacctggtctctccaaaaaacaaaaacaaaaattaaccaagcatggtggcatgcgcctgtagtcctagctagttgggaggctgaggcgggaggattgctttagcccaggaggttgaggctgcagtgagccaagatcacaccactgcactccagcctgagcagcagagcaagagcctctctcgaaagaaaaaataataataataagagaagaagataagtattatctgtaatcctgctgtctccacttaaattctgtcaaacctttccaatgtgtttatacagacttacaaatatgactatgcatatttatatctacatacaacacccacaccccaggtgaagtctgtgtatccttttctagtgtctgcttagaaaatgaggatgatagccggctttctgcgggtctctcttgctctagtttttcagtcagctgttttatgtttagcatgttcagtcatgcttggagagacttacgaagcagaactgtcagttcccctctgtttagctccagaacatctcacacccacttcaacacaaggctctaccatgtttctctcactcaggatgcagttacacagggtgcacgcagggatgagaaccgttgatgtcaaaagcacaggacrctgatttgggaaattaaagttcacattttattaaagccaagtttgttttccttttgcaaattttccgtaaaatatgaataatgatacattctagtatttgctaaatatgcttttggattgaataaagggtaagacttctaaaatatgttttggttttgcacagtatacaaatctgttgtcctaacactcttaaaaggcttttcaaatttaagaaagttaagctgttttataaaaattcctctgtatgaagtaaaatattttgagctacttgatacaatttacmttgtaaatttcagaggaaaatattatagtatttaacgttgacttttgtaattctaaaattcatatatgttccctaaatcctgtgcatctctcataagaaaaggaaaactgatgatcagaattctgtattcatttaaagttctctgaggtcagggacttgcagttacttccctctttattaactctttcgtccgtatgctttgaaatgctatataccattgtagttgataatgcaaaaactgtcttatcagtgctgggtcagagtgtttttactcccacatgaggcatatgtgggtgctagaggcagaatgttgtttgacaaagtgataaaggtgttccttctgagaacactgaagaacctcttgtaaatacagtggctttgttgaaagcactgaaggtgaagggtgtttgtgtggcttagggacagggtttcctctcatttaccaagggtctagcctccaacccagtgagcgtggggatgcttgcctgtgmgcttccagagcagacggaccagggaccccaagtgctctgtgcagtcagcacacccccagatggaagaccaaaagtgtcaggcagcacaggcacagcagtcattgctcctggatttaggagagaacttttctgaaggaaaacttttaagagctttatcaggttacttttcggttaggtaccctttctgtgacattttacaggtttttgctaatttaccaaacatctttagtaagacctcattttccaggtagaatgcttggtgaaaagagtgttttcaacttctttagacctagatttgatattcaggtattgatgatttggaaaatttggagcctatccagatcacataaaatgctaatattgggagattcactgtttggaaagcattcaccaagggtgtgtccaggtggcgttttgctctttgaagagatagattaggggcaggtgttagtccgttctcaccctgctgtgaagatactatactagactgggtaattgatraacaaaggaggttgaattgactcacagttctgcatggctaaggaggccccaggaaacttgcaatcatggcggaaggggaagtagtcaccttcacaagtcaccttcacaaggcagcaggagaaagtgtgagcatgtgaaggaggaaccatcccacactcatcaaaccatcagaacgcatgagaactcactcattatcacgagaacagcatggaggaaaccgcccccatgatccagtcacccatctccctctacacacggggagtacaattcgagatgagattcgggtggggacacagagccagaccatttcaggggctgactaaaggatctactcagcaactctgcagaaaccaggartagagatgggttatccaagaaggatctgtgttggagtctgttttctgatagtgtggactctcaggatatgcacaggagacccatcatgttttatcagcagaaactaccagcttgacctaaaggaacagagacaggatgagatgagagaagcctgttggactcccagaatcttacaggcaggaaacagcttgatagagctactggctgcaagcatgtgctccctttcagaaagaggaagaatgaccccaaggtcaaaattggcatgagcagtgcrgaggccatggagctgccagcctaagggcagagcactgagacacagttcttctattattctcagctctcgaaacttaacagtttgccttgctgaatttcaaacttgcttgggatcagtgatcttgtattccttccagtttctcccatttggaatggaaatacctatttatccttgtcccaccactgtattttgggagcagatagcttgttttctagtttcacagggtccacaggtggagaggaacttaggtcccagcatggaccatggccagtgtctcacccatgccaaatttagatggtttagatgatgagatctggggcctttgagcagatgctgtttggatgaaattttggacttaatgttgatgctataataggccgagacattagggatattgggatggggtaaatgtattctgcatttgggaccagtgtaaatttgcgagtgctagagggtggactcccatgcatgccgtgatggcccccagaacatgtgcccatatgaaatctgtgagtgggaccttacttgagaaaagagtctttgcagttataattaagataatgatctctaaacgagaccatcctgaattagagtaggccctcattgcagtgaatgtccttgtaatcaaaggagtgggaatacgccaaggagaaggtgaggtgaagacagtggcagaaactggaatgattcctctacgagccagggcacgccaaggactgtgagcagatccagagctggagagaggcagagcagcccacctccaccctccacaccccaccacccccgaccagtccaggaggaaacagctctgcctgcaccttccagatggtgagaaaataaaattctgttgctttaagacatctagtgatggcatctttaagaaaccagtacaccacatagagtcattttttacaaaatgcttcatcccctgctcttggcaaggtagcgtcaggaagggtgagatgctgcagtgctccatggctactgttttgcttgtaagaaacagttcagtttcccgatattcaggaatgtttcctctctgcctgttgttgctcgagtgttgtgggaggatgtctccttgtcctactaagtgtcctgctaagctcccactttataataggcagctcagccttctgcctgctgaacacttggttgaatgtgtaacagttcttcatttactcaccatccgagtatgtgcttttgggaggtgttgtgatgggccattcagctcagtacacgccccacgctgctgtgtgtgagggtgcagggatgaatggcgtgtaccctcgggaccctgcagctcagtcctcagcgtcttcatctggacaccccgctcccctccctccctccctcccctttccttgctttttctctccatagaagtaaaaattatctgaaactttaattcctcctcctctccccacaacctagccctcaacaaaagccaaaaaccattccctaaacattcaagtttgtttagaattttttttaaatatatttttctttaggaaaaaaaatacttttctataatttatgttacgtttttagttactgagcatggctaattcatgaactctcatcactagttttatctaaagtttatataaagttgaaataaaacaaagttttattttatatatacaaaccttattgcctctaattgtggaaatagtgctggggaacagagaagtcatttgatagaaaaagggcatagtttagaagtaattttggctaaagagcccctttttctggttcacttatttgaactcagaaaattcagagttctgaatttggggaaacaatttgaaacatttctatgatgaagcatgttttccagattttaaggtcagtggagatgctgtgacaggaaacctggttaatactgcttttgtaataccacagtccatcccctttacgtggtacatatgccagggattccatacatgaaccctgagggtccagcatggctgcaaaaaccatctagcacttagcacccgtatcttcacccagtttcagagttaaggtgccatacacgcttaagatgtttccttttatactttttctgtataaatctcttattagttatagcatgaattatgtgccagtttttatattggcttagaaaatatatttttgcacaattcatttcatttctyttgaaataatcactgtcttggctttaaaaaaattatagttaacaaatttattttaatctatcaaaaaagttattacttcttgttgcacaagctacttcagcagcctttgagcattgttttattttgtaatgtgtgggctttacaatttttatttcatttttaatagacatatatatttatgagatacaatgtaatgttttggtatatgtatacaatgctgcttttatggttaacttcttgcttttcctaaaggtttgccacctaaaaattgcatatataaatatatgcagtcatctcttggttcccatgggggattggttccagcaccctccatggataccagaacgcatgtgtacccaagtcccacagtgggccctgcaaaacctacccgtgggacaagtggaccctccatgtctgcggggttcgcctcccaggaatactgtgttttgatgcatgtttggttgcaggtgcagagccctcagatacggagggttgacttgacttactaaaaagagtccatatctgagaggacttgcacagttcaaacctgtgttgtttgagggtcagctgtgaattagtttttcctgttttgctagtttctataattgaaatcatactggatgttttctttttgtcttattccttttgttttacatggctgtgtacaggacgttgtgttgtcttcttctcatttcttgcagcttgtcattctcttgcatgagcacactccagtgtattcagtgatcctttctgctgttttggggtttgggttgcttccagtttttttacagtgagcagcagtgctgctattaacatttcatgatgtgtactccacacgttagcaccctggtataagatatctaagagcaggccgggygcgttggctcacgcctgtaatcccagcactttgggaggccgaggcgggtggatcacgaggtcaggagatcgagaccatcctggctaacacggtgaaaccctgtctctactaaaaaatacraaaaattagccgggcgtggtagcgggtgcctgtagtcccagctgctcgggaggctgaggcaggagaatggcgtcaacccggaaggcggaggttgcagtgagccgagatcgcgccactgyactccagcccaggcgacagtgtaagactctgtctcaaaaaaaagaaaaggaaaaaaaaacatatctaggagcagcactacttggctgtgttatttgccaaatttaccagataatgtttaactgtttttcaaagtgtttgtaccaatttaccattccaacatcagtgtggagaatagttcacatcctcagcaacacttaatataagtgggcttctcattgcagttttaatgatcatttcccagattgataatgagactaaacaattatgcacatatatattagctatttagattttctcttttgtgaactttctaagtcttttgtctggtgttctgagcagcttgcagttatttatatattttagatgccaaggctttctcggcttatgttttgctgatatctttctcaatctgtagtttgactttttactcacccattggtgaaattatgaaaaaacagttattgattttacatgccaaatatatgaggtttttttttgttggttatcactttttatgttgtttaaaaaatccttccctactccaaggagatgaaactctcctcttacattatcttctagaagcttaactgtttttcctttgaccactgtaagtgttttttgtttttttttttgatatatatggtgtgaagtacagtttttaaataccatatttctgcaaaccaattgtctcagcaccagttatagaaaagacttttcccagtgacctagtgccccgtctgccatgtaccaagcatttgtatacacatgggcctgttttggttacctgttctgttcccttggactgtttttgtattctcgccaaataacaaactgtgtttgttaacagacttttataatagttcgatgtttgatagaacaagtctatcctcatgtgcaggtttgtgatataggcagacttgtgtcatgggggtttgttgtacagattatttcatcacccaggtattaagcctagtactcattaattatttttgctgatactctccctcctcccaccctccagcctccgacaggccccagtgtgcgttgttctcttctgtgtgttctcacatttagtgtgttctcaccatttagctcccagttttaagtgaggacatgtggtatttggttttctgtttctgcgatagtttgctaaggataatggcctccagttccatccatgttcctgcgaaggacatgatctcattcttttttatggctgtatagtattccatgatgtagatgtaccacattttctttatccagtctgtcattgatgggcatttaggtttattccttgttggttgggctggtctcagactcctgacctcctgatctgcccgcctcggcctcccaaagttctgggattacaagcgtgagccaccacgcctggcccgatgttgagctttttttcatatgattgttggctgcatgtttgtcttcttttgaaaagtgtctttttgtcctttgcctactttttagtggggttgttagtttttttcttgtaaatttgtttaagtcccgtttaggtgctggatattaaacctttgtcagatctgtagtttgcaaaaaaattttctcccactctgtaggttgtctgttcactctgctgttaagttttttttttgatgtgcagagattcttcagtttattgagatctcatttgtcaatttttgcttttgttgcagttgcttttggtatcttcatcataaaatcttcacccatgcctgtgtccttgatgtctccatcataaaatcttcacccatgcctgtgtgcttaatgtcattgcctaggttgtcttccaggatttttatagtttgagtttttgcatttaagtctttaattcatcttgagtttgtttttgtatatggtgtaaagaaggggtccggtttctctcttctgcaaatggccagccagttatctcagcaccatttattgaatagggagtccttttctcattgcttgtttttgtcaggtttgtggaagatcagatggttgtaagtgtgcagtcttagttctgggttctctattctgtttcattcatccttgtgttctttaaagagtgttttaggtcttcttggccatgaatatggtgtatctctcaattttttttaggtcttctctaaaataagtcttctcaaattttgttagagcggttcttagatacttgggatttttaaaatgatgtcgtaaatatcgttcttaaaggaaccatttcctctctttttgctgatgtaaagaaataaaattaatttttataaaattattgactatcaatcttggtaaaaatcctattgattttatttattaatctaggtgtattaaattttttctatatataatcatatcatcagtaaataataacagcttttttttgttcagttctttgcaccatttatttcttttccttgtttctgcagcaaagatcttcagtatgttgttaaagaaaagtgattataataaacattcttcttttgttcccatcctcaaaggcaaaactttcaacactttgtcatttaagtatgctataagtttgtttatagaagccttttaatgccttaaggacatttttctgttcctattttgctaaaagttgttttaaatcatgaatgtattttaggaaatatttttctaaatctattgaggatttttcatctttaaatttttcttctttaatgtattaacacggtaaatgatattgattgactttctagtgtcataccaaccttgtatttctgggggcaaaaccccaacataatgatggtatgttagtattttgtttattattagattccatttacttgtattttctgtgagatttttacattgatttacaggagtgaaattgacatgtaatttttaattttcataccatttttgtggagtttggtatctggattatgctagtctcataaaaatatttttttttctcattttctttctctaaaataatttatctaaaattggaattgtttatttcctgaacatttacataagaagaaggccatgtgagcctcaactttttactgtggaacatttttgacacattgatttagttatgggactattcaagtttttaatttcttgagtcagttttgcaaagttatagttttcaattcgtaatcaagtatttaaattttcagttttatttacaacagtttgttcatattttcctgttatccctgacatacataggatctgtgatatgarcctttttaattcttcatacttgttatttctgccctttttgctttcttttttttcctgaccactcttccaataggtttgccagctttcatttcttatggaaatacctactcttgtctttatgtattctttgagctgtgtattattttcctatttcattaatgttttcttacttatctatttcctccttgattagttttcaccttctgccccctttgtgaatatatgtattggaggctataaatttttctgtaagtactactttggttgcatttcaaaagttttcatatgtagtatttttgttattgttaagtacagaatattttaatttcgacgtgatttcatctttgacccatgcttattacaaacttatttcttatcttaatttataagcatagttgagaaatttctaatacatctttgttcatttttagtttgattgtatttttctcagagaacatacctttttaacttcagatctatgaaatgtgttgagacttgttctagggtccaatatttagtccatttttataaacattctgtgtgtgcttcaaaacaacttgcattcccaattgttggtcacaggatctcatctgtgtgatcagatctagattcttaatcttgtttttcagtttctgtctaccacaagggtttttctctttcataaaagttgctgaaatttgtcaaaatctctcatcattattgtgactttgtctatttttccttggaattctgtttatttttagtattttatgttttgtggctttgatattggatgcatacaaatttaaattgttgtctatattcctactggattaagcagtttctcattataaagkgactttctttatctctactaaagctttttgcattaaattctactttgttttgtgttaatgtagcaatgccagctgtctttaatttctttggcatatctttttccatctttttacttccaacttctctgtatatttatttttatgtgtctcttgtaattagcgtacatcttgtattagcatgccatcttgtaattggtttaatttttatctaaatttgataatttttgactagagtattgcatattcaattattataatactgtttatatttttagtttaaatctgctgttttattttgtgcttttaatatgacttacctgttcaatatttttctcctttcttgccattttattatttttttgtaatgcaacttttttctccagcagtttagaagttatgtaagtggtttctgttcttttagtagttaccctagaagttaaaaaccttcttaacttatcagagttaaaagtcagttcccttaagcatttaacttaatttgctcccttctggacttacaccatttttgtcatttattttaattctagttgttcttaaaccccaaagaaaaccctggttattcttaaacctaacaatatcactgattttgtttatacattctccatcattttggtttatccacgtttcggttcgtaatgtcttcttgcatcttagagtagagtaatttgccttctgttagaaatgtgttcgctttttgtgcttttgrtgctggtctgttctgaactctcaattcttgcttggccatccttcttggaaaatagtttcattgggtatagaattctaggctgtcacctttcttttttgtcttctgttactgcttttaagacttyacttctttgggtccttccatctcttccagccgcttttctatcctctcctcattggtggcattgtacgctctaccctacataatgtgttgaggtacgatgtttctttttaaacagtacttaggatttgttgggcttcttgactctagattcttttattcattctagaaagtccgccatcatctcttcagatgctgccccgtccccacctgtcgcgtcctgctctgggacatggggtcagggcttggtcgatgtcctcactgtgtccccacgcgggacatgaggtcagggcttggtcactgtcctcgccacacctttgtttccgctgctctcgctgctgcactttctgctttttttgcttgcatgcttcattttgtatcatcctcactgacctgtccaacaagtactcattctttgactgtgtgtaatcagctgttaaactaaggaatttcttaattttaattattgatatttcttagttctaaaaattctggttggtttctttatcacattgattatttcatttttaaagttgcctattccacacaaacatttaaaaaaawtttttatgtatccgtttgttttataatctgtatcaatatcagatacctttgtcaatctttttatgttgtattttggtcttctggctcttgcttctggtgtcttgttttgctctgtgttatgtggtagtgtttgttgttacggtgtttttggtaattgtatttgaaaaactaattataggaatcatttgggaacaaagatggaggttcatttcctaagacatacacacttgcttctgctgtgtacttggagataccctctgtcttggagcatcttcattcaagattccaagtcactggaaatgtgttcaggaaatgtgaacctgacttcagctccacaagcaggctcactggcctgcgcctgctggccctgccttccctgaggcgcatccttgcctccatagttttastgaggttagtgttaccattggatagaaaactaagcttttctaaccttgaaaagctcctgcttatcctccttgcggcctttagccggctccygtttgcctggtcagctttgttactagcacttaacataatcactgccckcttggttctgggggacttgccgcttgtctttgccattcctttcttcttagccttttggagacattttgttttaaggtgtagctcttaaattgcataaatcagtatttatttatttttaaactaaaagtgctagcctttaataggaatatttcttcctttcacaatcctggcataggtgttcagccttgctcctgcattcttgcgcgttcatttatatttatatgcacacattcatctattctatgtggcagctgtgtgtgtgtgtgtgtgtctgtgtgtgtgtgtacactgtgtatatgtttgtactgctatacagaatgtattttactttaaaatttttaaattatttgaaaattgcaaaactctcttaaaatttgccactgcttgactttatccaatacatatttaaaccttgatttcaaatatcaaagtcaagaaccaaacaataacgtgtgactcctcttaaatwtgaggattttaatcttcatttattctttttttctcctttgtacttcctagtatttgatcatttaatctgtacctgcaaaccctaattttatagttatttccttttaatatggaaatcttaactttcaaccagcaatgatggctctcctttgaggttggcgcccatgtttgcttaacaacatggagtcattaatctcggtgctcacctttccccattcctgagtttccaattttgattcattctcaaccaaccagagtacttttcaaacagtgttcttgagcttgcctggggaatgaagccccatttgtccccagagttcaggcacaggcccctctgtgtatttcacagtgacttcccacatgaaagtcggaagagtcctgagtgtgagggaagccctgaagcactgtttcccagttgccacagcacctggtcctgggggccactgtcagtctaagcagaaggccgggagttggctgcactgaagaccagcccctgtgagctgcatgtgcagcagggaatgtcttttgcttgccacttgtctctggtctttctttgattcagctcatcttcaaagctggtactcagcttactcttccgaaaacaccactttattgcaaatctccaatcatcccacacccactcagaaacattataatgggatttagaattttgcttacaccagtttaaatgactttctgtaatactttgctgtattttctttattattattattattatactttaagttttagggtacatgtgcacaacgtgcaggtttgttacatatgtatacatgtgtcatgttggtgtgctgcacccattaacttgtcatttacattaggtatatctcctaatgctatccctcccccagccccccaccccacaacaggccccggtgtgtgatgttccccttcctgtgtccatgtgttctcattgttcagttcccacctatgagtgagaacatgcggtgtttggttttttgtctttgtgatagtttgctgagaatgatggtttccagcttcatccatgtccctacaaaggacatgaactcatcattttttatggctgcatagtattccatggtgtatatgtgccacattttcttaatccagtctatcactgatggacatttgggttggttccaagtctttgctattgtgaatagtgccgcaataaacatacgtgtgcatttgtctttatagcagcatgatttataatcctttgggtatatacccagtaatgggatggctgggtcaaatggtatttctagttctagatccctgaggaatcaccacactgacttccacratggttgaactagtttacagtcccaccaacagtgtaaaagtgttcctatttctccacatcctctccagcacctgttgtttcctgactttctaatgattgccattctaactggtgtgagatggtatctcattgtggttttgatttgcatttctctgatgaccagtgatgatgagcatttttttgtgtgtcttttggctgcataaatgtcttcttttgagaagtgcttgttcatatccttcacccacttgttgatggggttgtttttttacttgtaagtttgtttgagttcattgtagattctggatattagccctttgtcagatgagtagattgcaaaaatgttctcccattctgtaggtttcctgttcactctgctgtattttctgtgtcttaggacccaagactacatttgtttgtccttacatcttgtgcaatggatgcagatcaaatagcatgcttccatgtttagggtgtatctctgcctttgttccagcggcacagcatgtgtaagctgtgtgtctgtgcatgcctgatgcaccgtatgcrtgtatgtatgatgtgcctggtgcacatctgcactccggagccttccctgaatcctgcacggatacgctcctgtccctgagctctctccactgaatcctgcacggatacgcttctctccctgagctgtctccactgaatcctgcacggatacgctcctgtccctgagctctctccactgaatcctgcacggatacgcttctctccctgagctctctccactgaatcctgcacggatacgctcctctccctgagctctctccactgaatcctgcacggatatgctcctctccctgagccctctccactatagctcaggctcttcatttgccataaaccctctaactcttcagatcagtgatcatttcctgtcattgattacttgctccactgtaactctcagtcaccttctgttatgcatcattcctaatccacacaatgaccatggcactctacagatgctgttcccgaggctcagaaaaatcaagtctgtcattggtctaagaaggtttgaaaattaggaatcaatacaggtaaaacacagttacctatgcctcctccctacgaagcatggaaggccagtggctgtggaacttaggaggttgaactggcaggagttcttgattatctggatgcaggcactggaaggaaaagggaaatggattactcttggtgtctggctgcagtggcaggtggccgtgccagtcgttatgatggagaaactttccacgctgaggaagagtacatgtgcgtgttttattttgtttggcccataaggggaggaagtaggaatgttaacacccattgtgtgtctgttcatttcagggtgtttgtgatgaatctaagatatctcataggaaatagaacacgtgtgcatctgaagcccggagagaggtctaaactaggcctcgacattttgggtcttgtctccaccatggatcacactggtgggactcacccagggagagtgtttgggcgccggccctgcctccctaatatcccatgaaaaatggaaagatttcacagagtgacaaatgctgggaaaaattcagatcacatggcctctgtgtcctttcagctttacgatctgtaggaaaagatgttaatttcttcggtaaaacttctgattaaatgacttctgtttcgttttgctcagattagaatccaaaaaataagtctgacagaggaacgcatgtgaattatttcaggtagtttcattccctgaggagaatctcgcgcgattctcagacaagttgtgggactgggttcacctggtagtgataaatgctgcaggtttaattataacaaattagagcttaaatgtagcaagcatcgtggtgcctaaataagattgcatggtatattttaggaaaacgcacttcaaatttttcagagtccaagttacctcctcagacacttttgtagctgtggagcagaaggaactttttggacaatagggaggtataattaagagatctgacattccgagatttacgaatgctttcttcctgtagcataaaacaggttcatgtatcttcctactcctaacattgctgaacacagtatttgtttaagataatttatttcatttttcatattgcataaaagtcatgactgccttttgtttcaggtaactgtctgaaatgacaggtacctttttccacttatctggaacaggtctcttggtaacaatttcacagttgctaaattagcaataaaatgagcttaaaatatagctggtattgattactttataatctatttctataattctcaaaatactaggtttaatatatattgaggggggktgacatattatgttacagtatagtactttacagctgagtagagatccaggttttaaaattctataaaattagaacattactaaaaattacacataatgcagcagtgatagctatactctgccaacttagtgtttgaaatctgagcatcatggagatttttaacgttaaagaggaaattgctgtattaacaatcaaagtacatgtgaatcacatgcatataagctgtctactctgtatgtagtattaaatgctcccgatgtgttgttatatactccttatgtggtattaaataccccatgtggtagtatatgtgccctatgtggtagtatatgcatcctatgtagtattacatactccctatgtggtattagatgcattctgtgtggtattatatgcaacctgtgtggtattatacaaaacccgtgtggtattatacatgctctgtgtggtattacatactccctatgtggtattattgtcttaattgaagtcaggtgtagtttactcagtgatctttcgctagtaagctgtaaacttgcatcctgcagtggctctacttatttttttcatcctgaagatgatctctcaccttttcatgagtagctactgctttatacaatcttccgagagcacttgtattcaacttaccatatttcagtggtaattattatattccatgaaataacttaatattccatgatacaacagctccgcgtaagtctaaccacggaaacggtttcatgagccataggcccctcgtgattgaggagcagcgcccagaagagccatcctggtcctttggcttccaccaccctgagcccagtggccaactgcaagctcttcagaaattcccagctaacagcagaaacccatttgcattatagtagctgaggcaggctgacactcttcaaaacagtatgacacaaatctgaaagaacacagcacatagatagaaagccatgttttccaaagtgcagatatccgagccaaagaatcagagccatgaatagcgtaataggaagtcaaatccccctttcaagcccttttcccctcttctgtacaggaaggcagtcatttcttggcccttgccccttgcctgcctccttctttcttgagtattgctaacattttagctaagtggtccatgacttccactttctctttctgattcacagagaatctttctccaaagcccaaatcaaagaagagttaatgtaaatgtgttttcttttccttcttcaaacctcccactcaccctaaactcatgtggaacagccctgctatttagtaaccatttgcaggaatgtccttagcttttcctgagcctttcctgcctgtcaaacactcctctgaacatttggcaggcagcagttcacatagtcttcagcacagctgataaaggtttcgtctctagcccatttgttaggaggcactggaggcatacaggtgggtaacttgtaggcgtcagcatggccagccagcactcctcgccagggagctgcagccgtcctgcaccaagaggccaagtggctgctgtgtccggccttgagtgtcatcttgcaggggagctttgagtcatcttcgcttagtgcttgtgtctttgattagtttgtattttaaatagcgaaagatggtgaggtgctggtttaaaaagctgtgtaattgtcaaaggcttactttctaactagtacatagaatttttaagatatgaactctatggacagataagtcaaagtatgattatttaatgttctttaacttacatacagacttccttcattgactgtgattcctaaagactatttttcgagtgtgtacttattaatagttgagctatgtgaattgccattttgctgggtcaaaaatgtttgaatatcagcagtttcactctgtggtataagtacatcctgtctgctttcttgacaggattaaattagacacatgtgaacatttttgagttgctgtataggaagaactgcgctgccagcagccgcatgagcagagcctgcctcctaaagtgatgtgatgtgagctcatgttctgacatggccgctctgtaggtttccaggcctacagggttccagccttctgctccactccactgcctccaggcaaggttctgcagaattgtccccagtcagatgactcatcatatgtgctttaattgcagtcttactacacggacttaaattatgaaattttaaaaatgactaaaaagtccagggcatagttagcagataccattttatttgtcatatcatatcccatttgttctgttttccagtttagctcctgaaacacgggaaatatcccattggtcatggtaaaacaagtggataaaccttgaggcccatttcccatgttgatttgcaggaggaccccgcctgctccatgtgtgtgccctgtcctgtaagcctttggtagttgtcccttgcgggcatatacgggcacactcacaacagtctgtttttctgtcccatctggtgttacagactgtcttgaaggacagaataggagttacctatttttctgtcacctacaaatattatcttgggtgtaaacatgtttgttgacttaaatgtcagtaaatacatttattttaaagtctaaaatccaatattatgtattttcatataaaatgaaagataatgcatattaaaaaatacgtgtatatggaaccatgagcctgaatgtgtggcctgggtctggatcacattaaccactgcagtgggttttatctggcagtttgggtatgaacttggacatgggtctggatcacactaaccactgcagtgggttttatctggcagtttgggtrtgaacttggacatggctctggatcacactaaccactgcaatgggttttatttggcagtttgcgtgtgaacttggacatgggcaaagcggtgtatggatggatgatgatgaaagatgagaacatccctggcacggtcgttcggaccagcactatcccagaggaacttgggcgcctggtgtatttattgacagacaaaacaggtactgttcgtggtctgtgttcacctttgaatggacaaaatgacatttaataaaaaatagcatagcgtatagatatatgtttatgtgtatgtatatatgtgtatgtattggaacagatcattgaatccatatttagaatttttcagcctctactcttgaaactgtcacacagcttaatcatcttctagtatacacagtatcataagaattatcaaaatgttaagttcttagagctttaagtaacatatttctgtgtttttaattttctacagtcttacagttttttttttaaactacctttgtaacacctccctagtggcttattaagagcaagaattccatgtttgtttattatagaatgatacttgtgagctattagaagaaaataacagatatgttaatttggtatttaatactcaaattctcctaaaaagctttactacagactatttatcccactctaaagctctaggaccaaaattctgtttgtccttatttaattttcttctttttttcatcaaagaactcttaccaatccgtaacagattaaagacaaacaattggaatctggtactataaggaaagccacatctgagggctaaaattcctccttgatttattgatttgtaatttaaattgcaagtaattcttagtgaactaaaaataaaagaatacttatatagcgtgataaacaaaatatgttgcaaacaaaattcaacatagttttaaactattaaatagtagaaaaatcctcactatagtcaacaagaggacagagaaatctgcaaacaagactgttatttaaaattcataatggaagctctagccattgcagcaagacaaatagaaataggatataagactaaaggaagaaacaaatatttgcaggtatagcaaaagtggcagattatggattaaaataacaaaacaggtctctaatacatagtggagaacagaccgaagagtaaagctccattcacagcagctgcgtccatagaagacacagaggcaggaacctgaggaatgaatggaaagggcacacagacggtccgcagcttcatagtcgctcgacttgatgcgactttgatcgagtggtgcggtagcttcactcgaactcgatggtggtgcagtagcttcactcgggactgtacttccactatccgtgcagcagttctttctttcactttcaatacggtgttcaagaaatcacatgggatattctttgtgttagctgattttgcccaactgtcaggtaacgtaagggttctgacacagttaaggtakacagggctaggccatggtattcggaaggtgagatgcattaataaccccatcataagttgaggagtctctgttttggaagtcatactattatctcaaaagtagaaattcagtattctttgtgtcagctctcwtgatgaatttgtaactttagtgtaattgaaagttcagttgttggatttgtgtttgagttccattagactttgtcttgtgagaggttgaggaacttggccaagagagcaatgtttatgaatcccagtgactcggagagcaatttgaggggcttctggttcaaaaaggtagactgagaaagagtgttaggattttcccttcccaacctcatgaagcctacagaaaaatgtttaaagaataaataaatccatggtaatacacagaaaacaagcaggagtaaaaatattagaggatccagaaattgagttatttctggaaaacagttggaatcagtttgcaggtgagagcagagcaaagcagaccaaagttgccagtggctgctgaggagaccccacatgggtgggagaaacgtcctgcagaacctaggggtggacgagccccagacctggagccgacaggtgtgtggggtggcacgggaagccatcaggccaccgtgagcggcgcctgtgagagcaggtgaccaccaggatttgctcatgtgccccctgcgagggctgctttcccaacgtggagaggcttttggggagaagcactcatgcgccccctgtgagggctgctttcccaacgtggagaggcttttggggagaagcactcactggttcatgtgcctgccccttatgcagagttcacagacagccccttgatttggaaaccagccctttggaggaacaggtttatggaacttcagaagaaacccaccccagcttactttacaaacaacttagtcttcattgataaatataatcagaaatgacaaatcaccagcatgaaatcaaagtagcaaaatatgaacaaccgtactgttcccaaagaaaacaaattcatagaaaaagcaaaagaaacttcaggaaaatgttcagaattttaagagaatttattcatatgtatgagtttaatatctaaattcagcagcaattctgtacaccagcaaccattaggacatttaataccaaaacaccagttagagtaacaacaaaaagtataaaatcattaaaaataaatgtaaacaaaaatacgtaagacctaaatggatgtaagtttttaaaatttgaaagcccttaagaccgaaatacataggcgtactgtcttcttgaatagaatatcttagcataataaagagatatcatttcttctcacattgaaagatctgatgtgtttgcaagcctaggaggaatcagaaactcctgttcactcttggtgggaacttaagttagcgttagcgcatcacttggtaaaacacattttggcatcatcagtcaagttgaatatgcacrtgttctactctccagccgttttgctcctgcttctgttccctacagaaatgtttgcacatctacaccagaagacatgcataagagtattcacagcattctaatggttaacaaaagcaagcaactgtctagatgtaacataaaaaagtttatcaaaaatagaatggaccaagaaattgtggaatgttcttacagttgaatactaaatagcagtgacgatggagtacggatattgacagaaacatggatggatttcaaaatagaatgttcaagaactaagagaaacataaaaaatttaataaggtttatttatataaagataaaagccatgaaagattaaaccattgaatatttagaggaaaataaargatcaagctgyaartaaaagaaacattaaaaaaagcatgtagaccaatatgaatcagaaggaaactggtatatctaccttgattaatattaagcaaaataaaccttaaaatgaaaaaagttatttaagaaagagggtcactacataaaaggttcaattcaaaatgtttgtgtacttaataaaatagtttcaatacataaagcaagaattgatacagggagatattgattatttgctgtcaaccacaggaagaaatgtttagatctcttttttttattgattagccaagcaggcagttcagaagatttgaatagcataattgtcagtttagatcttatggacatatatagagttacttatctaacaactagaaacasatgtgcttatcagacatgtatgagaaagttacacaaatttgatacatactaggccgtgagtcaaatttcaataaattttaaagagtggatatttctgatcacaataaaaaagagatgagttagaagttaataacaaagaaataagttcttaaatctctgcatttttagaaattgaagtatatacttttaaatagcatacatccaaaaataatacagattcaaaatgcctagaactaaataataatataatcactttatatcaaagcccatgaatgtacaaaatcaaggtttttataggaactttccttcatttttttaaatagaaaaacaagaaagcctaaaaattatctaaatggccaacttaagaatagtaaaataaattcaaggaaaatacaaggaaagaagataccaacagaaagcagtgacttgataaaaccatcaatgattaatacgtcctgtcagacttttgaaaaagacaacaaaataaacacactttcagaattctgatttttaaaaagtaagaaaaggtgggccaggtgcagtgactcacacccgtaatcccagcactttgggaggctgaggcgggtggatcacctaaggtcaggagttcgagaccagcctgaccaacatggagaaaacctgtctctactaaaaatacaaaaattagccaggcatggtggtgcatgcctgtagtcttagctactccggaggctgaggcaggagaatcacttgaacctaggaggcggagatcctggtgaggcgagatcacgccattgcatgccagcctgggcaacaggagtaaaactccatttcaaaaaaaaaaagtaagacaaagcatgaacacatactacaaaagagaagagaaacatagatacagatgtatctgatacttaaaagaaattttaagagaatgacaatgttttataaccagtaaatctaaaaagctgagtaatagaaaaattctcagaaaaaaagtgtaagctgttaaaaatgactcagaagaaacagttttagcaatcctaaaaccattagagtagtttttaaaaaaatcttctggggccaggtgcagtggctcatgccagtaatcccagcactttgggaggccaaggcaggcggatcaccggaggtcgggagttcaagaccagcctgaccaacatggtgaaaccckgtctctactaatggayctactgatagatctggccaaatcaaattgaacaccttctggaaaggattcacgattccagttgccattaagaacatacgtggtacctgggaggaggtcagcattcatacaggtttggaagaagttgattccgaccctcagggatgactgttagaaggtttcaagacctcagcggagggaagagccgcaggtgtggtgaaaatagggagggaattaggagtggagcctgaagatgactgaactgcggcaacctcaggatgaaactcgaacagatgaggagttgcctcttacggatgagcaaagaaagtagtttcttgaaatggaatccrctcctggagaagatgctatgaatgttgttgaagtgacaaccaaggatttagaagattccataagctaagttgataaagcagggtctgagagcatcgacttcagtttcaaatgaagttctttgagtaaaatgctgtccaacaacatggcatgctacggagaaatattttgtgaaaggaagagtcagtttatgtggcagacttcattgttgtcttatttaaggaattgccacagccagtccaaacttcagccaccaccaccctgatcagtcagcagccgtcaacattaagacaagaccctctaccagcaaaaagattaaaagttgctgaaggctcagatgattgttagcacgttttaaaaatatttttaaattatggtaggtatattgttttttagacatactactaattgcacatgtaatagacttactatagtgtaaacatcacttttctatgaactgggaaacgcaaaaagtcatgtggctcactttgttgtgatagtcactttattgcccaggtctggaaccaagcgcttcccctgtctctcagttgtgcctgtagtttcctatctagtttcctatgtacttcatatcctcaattggaaagggctttggaatcaaatctgggattgagtcttggtgccccccaactatgtgtgatgttaggcaaatcctttaacccttctgagcaaaagaaatgtgttgtcagtcactaaaatgttgtgatagtttgttacacagctctagataacaggggcacccaggccaacagagaaatacaaatcactctcaactctgaaagcagctggttttgcccccttgcctttgtgaggcctctagtaccctggtgaaaccagtgcatgtatttactgctaatcggttgttttattccaggaacttaaataattaagatctttctattttgtattccatattttagtcatataaataattctgctcttttgctctgcccttcagtgtgtaaatcagaagtcagacaggcttttgcagtcaccttgggggcctcagtcacagcagaggttctgtaactgtggatggttgtttattataaagcgtcctggttctccgtatcagaggaggcatgttgagccataaggcagtttgcagatatcttccaagtgccttgagtttcagctgaagtgatggagagtgaactgctgtctcaggagccttaatgttactaacataattggaaggtggtccttcgcaggagtgtaaatggggtctgtgcttcatcagtaagcttttggataagaagcgtccatcacagtggttctctcatttgccacggcagaatagaaaatgaagtatcccaataattgcattatagtttccttcttgtggacaagaaagcaatgtggtataattaggtttgattggagtgcacatttccggtaagatctgaaattaatgatgttgctatagtgacacatctgtggccaccagtgcatgaaacataaagcaattcattcgacaagcgtagacatctgtgaactgcaaggatgcagagcatattgacactgaccagaaatactcgacgccggctgataaatgaacaaatgatgctgaaacaggaggacagccaatttgtacttaatctgctgggagaactttaatcttctcactggttgcatttgacagtgccattgtttaaagaacaatgctgcagagaactcataaattttaaaacttaactcagggtgcagcctattaaagcaatacattaattcctttgttagggaggttttatcttcatgtagaacaaagccgttactaaaaacacccactaaaacaacaggttttttaggactcacattttaattatagcatccattacccaaaatgccatgttgttcagaattgaatcacatataagtttcacaagatggcatcatcatgaaggggaaagctgttttcccagtttgtaagggcaggcaagcatgacgtgtgtgctagtgagtgcatacgaggcaagcaaatctcacaggtaagacttggaaatgttttttaaaccaagtctcttatgcatgatgctaataaccgggtattcagttacagcaaatatgagtagccttactggttctgtttttactaatgtgtgtccttggatatgagtgctgtaattaacattttgggggtgtttgggccagttgagatattaacacatgcagataattaactgatgcataccgtcctgagaatcgcagtttagagaaagcctgatttgcagagactgtatttaactttgaatataatatttgacttcactttaaacagtgtcattgactttgaatatatttggcttcacttttaaaaagtgtcaaatattttcaaaattcaaagcatactttaaagattggcaaattagtcttatcacttaagttttgtttccatttcattttttttaatttttttattattattatactttaagttttagggtacatgtgcacaatgtgcaggttagttacatatgtatacatgtgccatgctggtgtgctgcacccattaactcattatttagctttagatatatctcctaatgctatccctcccccccaccccaccccacaacagtccccagagtgtgatgttccccttcccgtgtccgtgtgttctcattgttcagttcccacctatgagtgagaatatgcagtgtttggttttttgttcttgcgatagtttattgagaatgatgatttccaatttcatccatgtccctacaaaggacatgaactcatcattttttctggctgcatagtattccatgctgtatatgtgccacattttcttaatccagtctatcattgttggacatttgggttggttccaagtctttgctattgtgaataatgccgcaataaacatacgtgtgcatgtgtctttatagcagcatgatttatagtcctttgggtatatacccagtaatgggayggctgggtcaaatggtatttctagttctagatccctgaggaatcaccacactgacttccacaatggttgaactagtttacagtcccaccaacagtgtaaaagtgttcctatttctccacatcctctccagcacctgttgtttcctgactttytaatgattgccattctaactggtgtgagatggtatctcattgtggttttgatttgcatttctctgatgaccagtgatgatgagcattttttcatgtgtctcttggctgcataaatgtcttcttttgagaagtgcctgttcatgtccttcgcccacttgttgatggggttgtttttttcttrtaaatttatttgagttcattgtagattctggatattagccctttgtcagatgagtaggttgtgaaaattttctcccattttgtaggttgcctgttcactctgatggtagtttcttttgctctgcagaagctctttagtttaattagatcccatttgtcaattttggcttttgttgccattgcttttggtgttttagacatgaagtccttgcccacgcctatgccctgaatggtaatgcctaggttctcttctagagtttttatggttttaggtctaacgtttaagtctttaatccatcttgaattaatttttgtataaggtgtaagaaagggatccagtttcagctttctacatgtggctagccagttttcccagcaccatttattaaatagggaatcctttccccattgcttgtttttctcaggtttgtcaaagatcagatagttgtagatatgcggcattatttctgagggctctgttatgttccattgatctatatctctgttttggtaccagtaccatgctgttttggttactgtagccttgtagtgtagtttgaagtcaggtagcrtgatgcctccagctttgttcttttggcttaggattgacttggcgatgcgggctcttttttggttccatatgaactttaaagtagttttttccaattctgtgaagaaagtcattggtagcttgatggggatggcattgaatctataaattaccttgggcagtacggccattttcatgatattgattcttcctacccatgagcatggaatgttcttccatttgtttgtatcctcttttatttcattgagcagtggtttgtagttctccttgaagaagtccttcacgtcccttgtaagttggattcctaggtattttattctctttgwagcaattgtgaatgggagttcactcatgatttggctctctgtttgtctgttattggtgtataagaatgcttgtgatttttgtacattgattttgtatcctgagactttgctgaagttgcttatcagtttaaggagattttgggctgagacratggggttttctagatatacaatcatgtcatctgcaaacagggacagtttgacttcctctttccctaattgaatacccttkatttccttctcctgcctaattgccctggccagaacttccaacactatgttgaataggagtggtgagagagggcatccctgtcttgtgccagttttcaaagggaatgcttccagttttggcccattcagtatgatattggctgtgggtttgtcatagatagctcttattattttgagatacgtcccatcaatacctaatttattgagagtttttagcatgaagggttgttgaattttatcaaattcatttctgcatctattgagataatcatgtggtttttgtctttggttctgtttatatgctggattacatttattgatttgcgtatattgaaccagccttgcatcccaggggtaaagcccacttgatcatggtggataagctttttgatgtgctgctggattcggtttgccagtattttattgaggatgcttgcatcagtgttcatcaaggatactggtctaaaattctcttttttggttgtgtctctgccgggctttggtatcaggatgatgctggcctcataaaatgagttagggaggattccctcattttctattgattggaatagtttcagaaggaatgataccagttcctccttgtacctctggtagaatttggctgtgaatccatctggtcttggactctttttggttggtaagctattgattattgccacaatttcagagcctgttattggtctattcagagattcaacttcttcctggtttagtcttaggagggtgtatgtgttgaggaatttatccatttcttctagattttctagtttatttgcgtagaggtgtttgtagtattctctgatggtagtttgtatttctgtgagatcggtggtgatatcctctatcattttttattgcgtctatttgattcttctctcttttcttctttattagtcttgctagcggtctatcaattttgttgatcctttcaaaaaaccagctcctggattcattaattttttgaagggttttttgtgtctctatttccttcagttctgctctgattttagttatttcttgccttctgctagcttttgaatgtgtttgctcttgcttttctagttcttttaattgtgatgttagggtgtcactttaggatctttcctgctttctcttgtgggcatttagtgctatagatttccctctacacactgctttgaatgtgtcccagagattctggtatgttgtgtctttgttctcgttggtttcaaagaacatctttatttctgccttcatttcgttatgtacccagtagtcattcaggagcaggttgttcagtttccatgtagttgagcggttttgagtgagtttcttaatcctgagttctagtttgattgcattgtggtctgagagacagttcgttataatttctgttcttttacatttgctgaggagagctttacttccaactatgtggtcarttttggaataggtgtggtgtggtgctgaaaaatatgtatattctgttgatttggggtggagagttctgtagatgtctattaggtccgcttggtgcagagctgagttcaattcctgggtatccttgttaactttctgtctcgttgatctgtctaatgttgacagtggggtgttaaagtctcccattattattgtgtgggagtctaagtctctttgtaggtcactcaggacttgctttatgaatctgggtgctcctgtattgggtgcatatatatttaggatagttagctcttcttgttgacttgatccctttaccattatgtaatggccttgtctcttttgatcttcgttggtttaaagtctgttttatcagagactgggattgcaacccctgccttttttttgttttccatttgcttggtagatcttcctccatccttttattttgagcctatgtctgtctctgcacgtgagatgggtttcctgaatacagcacactgatgggtcttgactctttatccaatttgccagtctgtgtcttttaattggagcatttagtccatttacatttaaagttaatattgttatgtgtgaatttgatcctgttattatgatgttagctggttattttgctcgttagttgatgcagtttcttcgtagacttgatggtctttacaatttggcatgattttgcagcggctggtaycagttgttcctttccatgtttagtgcatccttcaggagctcttttagggcaggcctggtggtgacaaaatctctcagcatttgcttgtctgtaaagtattttatttctccttcacttacgaagcttagtttggctggatatgaaattctcggttgaaaattcttttctttaagcatgttgaatattggcccctactctcttctggcttgtagagtttctgccgagagatccgctgttagtctgatgggcttccctttgagggtaacccgacctttctctctggctgcccttaacattttttccttcatttcaactttggtgaatctgacaattatgtgtcttggagttgctcttctcgaggagtatctttgtggagttctctgtatttcctgaatctgaatgttggcctgccttgctagattggggaggttctcctggataatatcctgcagaatgttttccaacttggttccattctccccgtcactttcaggtacaccaatcagacggagatttagtcttttcacacagtctcatgtttcttggaggctttgttcatttctttttattcttttttctctaaacttcccttctyacttcatttcattcatttcatcttccatcactgataccctttcttccagttgatcacatcggctcctgaggcttctgcattcttcatgtagttctcgagacttggctttcagctccatcagctcctttaagcacttctctgtattggttattctagttatacattcgtctaaatttttttcaaaatttttaacttctttgcctttggttcgaatttcctcctgtagctcagagtagtttgatcgtctgaagccttctctcaactcgtcaaagtcattctccgtccagctttgttctgttgctggtgcggaactgtgttcctttggargaggagaggcgctctgctttttagagtttgcagtttttctgctctgttttttccccatctttgtggttttgtctacttttggtctttgatgatggtgatgtacagattagtttttggtgtggatgtcctttctgtttgttagttttccttctgacagacaggaccctcagctgcaggtctgttggagcttgctggaggtccactccagaccctgtttgtctgggtattagcagcagtgggtgcagaatagcggattttcgtgaatcgcgaatgctgctgtctgatcgttcctctggaagttttgtctcagaggagtacccggctgtgtgaggtgtcagtctgcccctgcttggggggtgcctcccagttaggctgctcgggggtcaggggtcagggacccacttgaggaggcagtctgcccgttctcagatctccagctgcgtgctgggagaaccactgctctcttcaaagctgtcagacagggacatttaagtctgcagaggttactgctgtctttttgtttgtctgtgtcctgcccccagaggtggagcctacagaggcaggcaggcctccttgagctgtggtgggctccacccagttggagcttcctggctgctttgtttacctaagcaagcctgggcaatggcgggcgcccctcccccagccttgctgccgccttgcagtttgatctcagactgctgtgctagcaatcagcgagactctgtggggtaggaccctccgagccaggtgcgggatataatctcatggtgcgcccttttttaagcccgtcagaaaagtgcagtattcgggtgggagtgacccgattttccaggtgctgtctgtcacccctttctttgactaggaaagggaactccctgacccttgctcttcccgagtgaggcaatgcctcgccctgcttcggctcgcgcaacatgcgctgcacccactgtcctgggcccactgtctggcactccctagtgagatgaacccggtacctcagatggaaatgcagaaatcacccatcttctgccttgctcacgctgggagctgtagactggagctgttcctattcggctgtcttggctgccccccttccatttcttgtaaggtctaagtaagtttgtgttttgatacatccgctgattatgtatgtgtcttactttgtttaactagaatcttcacaagaaagtttattgctctaggtgcgtggcatatctcagtgttacctttctttatatattaaaatcactggctcccttttgtatgatggtgtggtagagtttaggggtgaggccaattcacaattcaggaatatgtggtccgaaacctctgcagctgtgtctcagaaactgtctactyggctcagtcatggatcacatctgttgccactctgagaatgatgcctgcaggactttttccctagaaattaatttcctctttgcctgctttgttcattatagtcccaaaaaactctttttcattaaagagctgcagctttttttttttaagaaatcagaaaccttttgtcaaaagacattttctgtctatatagctacataccatagccgagtctgctgtgaatctctttgacgtgacggcactcttactctctggctgcattcattcctcccttttccaaagcttccaatttgggggcatattaatttctgttgtattaaaatgacaaaagttgtagaaatcatcagtgtttgaaatcatggagagcatttgaggtaagatttgaaaaataattttgtattacagactctacattatctactactgcmtaagaggtgaaggaaagtctgaaattagcaagttatgaaattaaaaaatcatcgagatttaaaaaatatttttgggcttcatcttcatatgtgaagaaagtacgtgtgccactcacctgaaggaatgtctgcataagtattgcagtttctttaacccaacaaggtgtgattgcatttattcacatggacagaataacaaacccaaaaactttatcrttcgttgatgagaagtgttagtcatttatttgaatgtcagttttaagctactgataacatgattgattagcaacggaaacattttagaagataccacgcatttgtttaattcaaatggtcaactgtcaggatacatcgctctcttattccactctcaccacaatctaactttaaaacattctcatcaccctaaaaagcaaccttggcactccccatcctccccttccatcgcccgtgccccaggcagcccctggttactttctgtctctgaggacttgcctgtcctgggcgttccacgtaaatgagtcagacctatgcagtccctgctggcctccttcactggcatatactcttttactggttcatttgtattgtagtgtatatcagtacctcatttctgtttattgccaaataatattccatcgtgtggatacaccacactttatttatccattcataaggtgatggacatgggttgtttctactttttgcctactacgactaatgctgctgtgagtattcagggttctagccaatgcagttaggcaagagcaagaaggtggcgtccacattgtaaaggagagcaaaactctctctgtatgtgtgacatggtcatgtccgtaggaaatcctcaggagtcacccagccctctattaattaaaggggtttggtaagattgtaggacgcaagatcaacacacaagaatgaaattgtatttctgtatgctaacaacgaaccatccagagatagaattaagaaaacaattgtatttacagtgcatcaaaaaatatttcattgtgttaagacggcaacaattctagcttcttttatctataggttctgtgtaatacctactaaaatcccagctacctttgcataaattggcaagctgattctgaaattcacatggagatactagggattcagcatggctacaacgatcttgaaaaacaaacaaagttagaggacttgcaactcgtgatttcttctttaaaaaaaaaaaaaaagacatgcatccgaggaatgtgggctgcagagtggggggtgggtgaaagatgtgaggttaggggtttgttttgttttgttttgttttgtttttgaaacagggtcttgctctgtcacccaggctggagtgcagtggcacaattgtgggtcactgaaaccttgatctcctgggcttaagtgatcctcgtgcctcagcacccaaaatgctgggattacaggcatgagctattacacctggcagcagctcctggtttcaaaacctaatacaaagctacagtaatcaagacaatgtggtatgtggtgcgggcataaggacagacacatagattgatggactagaagtgagaggccataaataaatccaaacacttacggtcattgggttttcaacaaggatgccaagataatgctatggagaaagaacagtgttttcaacaaatggtgctgggcaactagatatcccatgcaaaaaatgaagttggatacttatcccacttgtacctaaaagctaactcaaaatggatcatagacctaaatacaaacactaaaattatagtatttttaaattactcagctttgagaaagtattctaaatttgttatacagtttgaatgtttgccccctcaaaaactcttattgaaatgtcatccccagtgtgacactattaagaggtggggccgttaagaggcaagtgggtcatgagagatctgctctcatgaatgaatgaatctactcatggattaatgggtgaatggatcagtggattttcatggagtgttagttgtcataagagtgggtctgttagaaaagccactttggccctcttgagcctcctcccatcatggggcggcctgcagtgcctcaggactctgcagagagtccccaccagcagaaaggccctgaccagatgcagcacctcagcctcggactttccagcctccagaactgtaagcaataaattcctttttaaaattaattacccagtctcaggtatttggttatagcaacagaaaatggactaagacagttctccatttcattctccctggctccaattaagtaactgaataagacttttggtatctactgagatataaagctttataaacataactcaaaaggaaaaatagttcaaacctaagtttcagttatattttaaattattttcaactaaatgcataaatgcgcagatattatattcagtattttagcattgccttgcatgtttctgtgacagctatctggtctccagtattttcaaggggtctttgtgtacatgtagaattcctctcagttttctccaagcagcagtaagaagcaaagtataatagcatagctgaagttgggaatctcagaacttgaaatactaccaccaagctgagaaaggacatctaactaaagcactggattaaaatagtgctttaaaatccctgatttactgtctagaaagagtctgtgaatggagtgattataaatgatgtaactttgtttttggaaaacatctgttgtccatgtggattttttgcatttagaaatgccagagttctcttctccagaaaaagatgtcccaaagtcaatgataagtacctcaactatatgccactttcaacccatgatgaattcgtgggcctaggaatcgattgtgggtggctgtttacatcagaggaggcggccagacaccctgcttcctgatggaaggacgctccctgcgctgcagcagtctccacggaaccttgcctcgccagccttgcccagccgtggctcacaggaaacacagggcccacaggcacaggagaaacggccagtggccaagtacagattgtgggaactgaaaccgtcagtccaggttctttaacaaatcaatttcaaggaagaaagagatggaggagaaagctgtagagtaaaagaggctcaagagacctttcctggatccatacttcagacaagcagtgtaaaaaactatgacacacgagacacctggaaattagaaccctgacttctgtttaacatggaggagttattgtggctgtctggtgtgctaatatttcggttctgtttaaagtgtctttcacaaatgatactgacatgcccatggttgaaatgatatggctcagattagtttcagcagcgccaagaggagtgaagtgagggctcagatgaaagagctgccctaggtccatgttgccaaaaaggagcgatggccacagggctttcaggagactatctgtcttcttgaggtaatttaacatttccttttaaaaatgtagaaggggtgaaaagaacatacgttcctggatttcagttccttgcatttaatatctttcaaatttacatacaaaaatgacattttctgtgtgttttggttttattccagctataggtacgtgtgcgtgcatccatgaatgcaagcacacacatacacagacacagacacacacacacacagcaaggttgatgccccatataccatgagggatttctagtgtgtattcygcatgttgaaatggtattattaccaggaaagtggaaattttgactattagacacccaaaatcaacatttcactgttcaaatcaactgccctactaaagcatcagaaatacattggtctagcaaagtgaaattggcacgtaattatgtttataaccatcttactcattgatttcctctaagaaaactgtgttatttaaaacctattataaagtttcatatcgagaaaacttgaatcttttactgtctacaatttttctcattgctttttggccaactgtataagtgaaagggggtattatgtctgagggcagaatgtacatggtgtttaaagaataattttcacacatggcaaattccacatttgccaaacctctcctcccattttctttttaaatttttatatgtgtcattagaatagctttattcacaatgcagtgatattccctgttgtttctgacagcagatacgttacactcaggtatcatgtggcctgaatgttcatctctctctaaaatccctgtgttgaaactgagtcccagatgatggcatagtactaattaggagaggtgactgggtcatggggcagagcccccatgaatgggattggttcccttaaaagcaaggtcctagggaggcagattccctctcccagccctgaggacactgcaagaaggctccactatgatgagggccctcatcagacaccaaatctcctggtgcctcatcttgcatttcccagccgccagagctatgagaagtaaatgtttgttgtttataaaccacttggtttatggtattttttaattttaatttttattttttgagacagggtcttgctctgtcacctgggctggtttgagacaaggtcttgctctgtgactcaggctggagtgcagtgtcgtgatcacagctcactgcagcctcaaactcctgagcgcagtccatcttcctgcctcagcctccctagtagctgggactgcaggtgtgtgctgccatgcccagctagtttttgtatttgtgatagagatcgagtctcaccgtgttgctcaggctggtcttgaactcctaggcccaagccatcttcctatcttggtctcccaaagtgctggaatgacaggtgtgagccaccatgttactgcagcccagaaggagtgagacaggaattaataacttaataacacatagtttcaaaaatcaattactgtaaattgtgtggttttttcctaaagatcttgtgtggctttaaatttatctgcatgttgccaaacctgtggtgagaatcctacgctagctgcactttgcaacgtcaataacgaggtaaaaaacagatttttcaaataaatctcaagtatttttaaggacaggaaagaactaaatatagaaggtatcttccggatttttatataatatttccaactttggattccacacagaaaatattttcatccagggcagaaacagtagtgcaagtgtttgatttctgtttacagcagtcttctatataccttccaccacccttgtttcataaattaggctcgttatcattattcttttttaaaaatttaaatcagcaacttttttggctgctatttaggagtcaggttctggggatagagttgggataatacagacactgccttcctggagattccactgcagtaggggagatgcacgctcagcagctaaagacccagagagaagacagggatgacccacagagaagacagagatgacccagagagaagacagagagatgacccagagaggagaaagagagatgacccagagaggagacagagagatgacccagagagaagacacagacgacccagagagaagacagagacgacccagagagaagacagagagatgacccagagagaagacagagagatgacccagagaggagacacagacgacccagagagaagacacagacgacccagagaggagacagacgacccagagaggagacagagagacgacccagagaggacaaagagagatgacccagagaggagacacagacgacccagagagaagacagagagatgacccagagaggagacgcagacgacccagagagaagacagagagatgacccagagaggagacacagacgacccagagaggagaaagagagatgacccagagaggagacagagatgacccagccagagaggagacacagacgacccagagagaagacagatgacccagagaggagacacagacgacccagacaccacaggggctagcaagacgcggcccgccgttctcatcgcgttatgaggcactcagtaaatattaaatacacattttatatattgtgggtatttttggtaatatatctactttttagtgagacaaatgggatgtggaattccatgactgtctatgtgggtgtccattaggactgtagtttgtcctgtagcttaattttactatatttagatgtaggggtttgtactttacagatcaaaaattctcttcttaatagagaagtttgttgcactttcaaatacattatattatgtttagtttaaggagataaaacagctactcagggacttaggatttcatgtttcgccttgataagactctacactgtcgtgtaataattgtatctaatgctggcctgatctgtaattaggaaggaaacactgcaatgaccttaacagaacagccctgggtataaagagcaggaagggatgcagaaaagcatatgacaaatgtagccctcattcatgctttaagaagaaaactcggaaaacaaggattagaggggaacatcctcaggttgctgaagagaatcttaaagagctgaggctgaggcctcactctgtgtgatggagacgcacgctttccctaggtcaggaaggaagcgagggtgcttgtccaacagtgccagcattccagacagtgcagtacggtaagaaaggggaatgcaaggtatggatatcagaaaggaagaaatcgagttaaaattaaagaaagaaaattgtccctgtctgcagatggaataattatctacctagaaaatccaaggaatgtacaaaaaattctgtgagccagtgagttcagcagggtcacagggtagactgtccacatgcagaaaccaatggtgtatctacacttgcagtgaatatgtgccagctgagatgaaaagtacggtgccgtttataattccttgaaaaaagcgcggtacttagccgtgaatctaatataaaatgagtgggccttgtgggctgcaaactacgtcacactcatgaaagaaaccaaaatagaccgaaataaacacagtgattttgctcatggacctcaagtctccacacactaaaaatgtcacttctcttttcgatattcagtttaattcagtttctgtcaagatttgttttgtaggtaagattatttctaaatttatttttaaggcaaaggagcaggatagctgaagtgactttgacaaagaagaaagttgaaggactcactaccagatttcaagacttaaataagctgcagtcatcaagactgtgtggtattgggggatttttcaatggatacagaacctagaagttggccttgcaccaaagaggatatgggaacagaacatcagtatgaggaaagatgttcctccttctcaggaggcagagtggctgtcccatagccacttcagactcaccatctgtgtgttctccccttctcccaaagctgtctactttcttaattcctgtttcttgttgagggccagcctccctgagcaaggcagtcagcctgagctgctcttcgaggtcttggatccggagcctccacattcagttcccaagtccagttgatgctcttttctagacttctgaagatttcatgcatttgcctcttcctttctgtcttgatgcctgctgccacatcatccttcacgtagaccttgatcccagttctttcccccacatttgacccccaccactctgtccttagaataatgcctcagttaactctgttacctggacagggcccatccagaatgaagccgggactcctgagcctggctctgcatgccctcttggtggacaggaggctctctgcttcactgtgctctcttgatgggacctagagagctcctcaccccctcctccctctccagcccttctcttgtgtgtgtctcttccattcacaggcatttgtctttgctcccagacccatgtgcgagccacatacagttccctcttcctggagcgcttctcttgtggaaaccactagtaaattcatatgcttcaagtcacaggtcagatgccaccactcctgggagcagtccctgccccctctctgcagtctcctgtgactgcaccacatggaccctgcattagtgcctctcagtagcatgatctcttgcagcctctctccctgttatgctgtgggattctttaggaaaggaatcctcaccctccttgtgtttggggcactttgtgcattgtcttattcatttttatccatgcaacatatgagatgtattccgtattttacaggtgaataaactgaggcttggagagcttaaatccactctatgaagttttgcagcctgcaggttacagcaggatttggactcccaagctcaatgagtagtgatgcattttcatgagtttttgccaaatgaatacacaaattctcagtgggaatgtgggagtcactgtctgtttagagaactgtagctcctgctgcagatgggcagctctccggagccctgtgctgtgccacgaggagcagccgtaggccgggctgtgcagagccttgtctccatctaaggagtggatgctttgattggtaagcagtggcgaggcacggatggtcactaaaagcaacgtactagaatgaggaggtgtttgtcttcggaaatagcactgctggggaaggtaggttaaagaatgttggagctgagctcaggaagccacggaagaggctgcagtcaggacgcgtggtaagagggcagagcgaaggagcttcaggaggggggcactccatgtctgaagtggggttgagaggtttgagagcgtttgggaggtagttgaatccagaaagtgaggaaaggttggtggtggtgatgatggctgtggaagagtagctctcgtttatttaggactgactgggtcaggcatgtcacctgggtgccctcgtgtcatccttggaccaccctgcagtgcttgcaaagtgaggaggctgagtgggaggtctttcccttctcggttaaggtatccatagggagaggccagcggggccagacaggccccttgcagatgtctcagcaggtgctgagggacagggaggtgcaggctgttgagggagaggcgaggctgggctgtgggtcgcatgtgggttgcggtgaggacacaaacccctttgtgaggacactgagacttgagcccggggctgcggggccgtggacaacagcacctcacatcccagwgggagctctgcacttgcagctgactccacacccagggcctgtcacagccgcccagcaaacatactgagcaaggactggatggaaaatgagatgctatttctttctttagggttctttgcatacttgcacagtcatttaaaatcctaaagaagtaattgttcrctcttggtaggagctatacaggtgttcattataatattcttttaactttacatatgaaattgttcataataaaaaagttgggttaaaaaagtggcattaatcatagtcctgtttacaaactgcataggatttatgcctcattacgattccccaccctaaatcatcatgcttcacactaagagagaaaagtctaaaggaaatactttgttatctcaatctgctaagtagaatgtttttaacttagcacatttgttaaataatttttcagagagctgcttacttgggcacacataatagaggcaaacttggtacttaccctaataygaattaatgtaaggtttcattatcttttaactgttggcagtgatagaactaccatttttcatctcacatttttgctatttaaagcactcataggccaggggtggtggctcacacctgttatcccagcactttgggaggccagggcgggcagatcacctgaggtcgggagttccagaccagcctggccaacatggtgaaaccctggctctactaaaaatacaaaaattagttgggtgtggtggcgcacatctgtaatcccagctactggggtggctgaggcaggagaattgcttgaacccaggaggcagaggttgcagtgagccaagatagtgccactgcacgactccrtctcaaaaaacaaacaaacaaatgtatgaagcacaaatgtataaagcacttgtagaacttcatgatggtagtcagagactgaattgttgctaactgcattatttaatatagcctagtgttttatgttaattctacttatttaacaagagtagcatgacaaaacaaaaaggtttaaactgcctctcatgtaattttgatgattttgtttccacttagatttatgaaacttggagacatcttttcaaggtatacagagcacagccagtttaaaggtgcttcataaaactttgtggaagccaaaatctatagaactgagaagcatctcaggtagatagttagctgctgtttggaatttttaaaactttattatattcactcttctaagagcatttatcaaaacaatctctaaaatagtaattgtaagctctattttccttgtctttgaaagtaagcgctgtgtcctgatggaaggctctgagccagctgacctcttgagttctgatcctaactgattcactttgtgctctaatcctcacgcacttagagggtaccatagacatgaaaatagtttgggttatattccagtttgggttatattccagtaccatgtgtgccaaagaacataaaaatgagtgaatatttttatggatattttgcaaccataaaattgggttttatggttttattgcagtcaattgcaattttgtgcaatgaatggctgtgtcattgttcatactcagatttataacgtcagcagtatccgtggataacccttcttggatgtgctgtgaaataagtgcagaaacctccctgcccccaccctccccggggacaaggtgaaagcagcacgttgtgaaataagtgcacacaccccccggggacaaggtgaaagcaccacgcgtggcaccacgttgtgaaataagtgcacacacccccggggacaaggtgagagcaccacgcgtggcagcacgttgtgaaataagtgcacacacccccggggacaaggtgaaagcaccacacatcgcagcacgctacatacatatccagagggtatttgagcttccctgtgctactttgcttctataaagccaaataaataaaacatatgcacatgtaatatgtgtatttttaggttaaatgagatctctttgtcacctaatacatggcccaacttttctggcagtcctcctaagggaggactgtggtacttgaggagcaggcattagggaagcacattcagatagcccagtatttggaaaacactaaagaaaagccatcctatctttcacagacctcctgtctgtcattccaagggacacacatacatgctaaggattaaacacatctggaatatccatttctgttcagctaaaaagacttaattttttgaaataggtttttttaaaaaattaatggacaccctaatttggggcttgttgatgtctttctcaggcagtgttctatattgtaattataaaggtggtgactcagttttctagttttatgtccgcctctttcagagcaggcaaaagttgcattcgttccaaataacagatctgagctgaaaggcaatgacggactttcttcatataactagagcccttctcattattaaacgttgttagaggctgcgtgtgcagtggctcacgtctataatcagaacactttaggaggccaagacagaaggatcgcttgagaccaggctgggcaatgtagggagtcactgcctctacaaaaaacaaaaaaattagctgggtgtgttgtcgtgcgcctgtagtcccagctattcgggaagctgaggcaggtggatcacttgagcccaggaggtggaggctgcagtgagctgtgataatgccactgcactccagcctgggcaacagagtgagacccagtctccaaaaaaaaacacacaaaaatgttataaaggtaccttgacatgctagggagaaaatatcttgttcttcctattaaaatgaaaatagtagcaagtaacaatcttaacgctactttgtattatacagttgggcatcccagctgcttcagcccatgaatgtgcagcatgcctgcatggtaggaaagctgggtgttcccrcaggcctcctgcattaatgtgtttgctgttgtcccctttatcctaggaaccctcacccagaatgaaatgatatttaagcggctgcacctgggcaccgtgtcctatggcgccgacacgatggatgagatccagarccatgtcaggractcctactcacaggtaagtgggttcctcctgcacggggtctgcttccacacacatcccgcgccatgagtccagctgagcctcgtgtgttcccatctgtaaattagcacgcttcttggtggtcttaacatcctgctacttcagtcgtctgttcgaatatacgaatcaggaaatcgtctttgatgagcatttgtacatgagtgaaatcrtagaaggcatagtgtgctgaagtcatttattcatatcacattttactagtgagttatttgtaaaaaattattcagtaaacattgtagttgaagaatgttcagtaggatactacatcaatatgttttctaacagttctgtttttctctataataaaatgttctcatatttttaaaggtaaattctttttttgccttttcggtagataaaagtagacaccatcgtgttgggaatctcgtatctgtcattcacctacctgtcatcagtgcccaggtggtgatgtttcatctgtaggtgttcttcattattattatattatgacatgaagctcaaatatcacattctttcatctgtaaatatgtattatgtgcccctaattgataaggactctgcctttcgttggggccaaagctccctaaagttctgagaacaggaattagaggttgagtatcccttattcaaaatgcttaggaccagaaatatgttggattctggatttttttagatttggaatatttgcattatccttactggttgaacacctctaatcgcttatctgaacatccctttgagcatcaatggcgttcaaaaagcttcragttttagaacatttccaattttagatttttggatcagggatactcaacctgtatttgcttttaaaacaggatttagcctagaggctgtaccacttgccagagattttgcaggcagtgggttgtgtatagagtctgtccatggacccaagtcatcctaacagcctcattcctgctgtaggcacctcagagccaccacactgagcacagccctggccctgaggagtgtttccttgtcattcatttgcatttttttgtgcctgtcataatttgaagtcattgattcagtttgatcagacctggagatctgagagaatcaatttaagagactagcagacaaggctgcagtgtgcgtcacaaatttacaccttctgaggccctttttctgcctgtttgttgatttattctgaatatagtgatccacataataatgagctaaggcctatcaggttcaaaattgtacatagctcaccctggggggtgtgacagttcccagcgctgcacggcactgctccccggacttgcagaggccacccttcaaaagtgtacacagcccaccctgggaggtgacagttcccagcgctgcatggcactgctgcccagacttgcagaggccacctggcgacgtcagctgtggagtctaggagactttttgtatttacagtaatttgtttcaaacttgattttcgcagagactagactaaatgacactttcccattgctgcgtttctactcttgacaastccagagtagcattcagtggtcagcattgtattcagttttttgaaaaccttctctttcttgtatacttgctaccagtctggcataagctttactgtcggcatgctgtcaaatggaagaagtctcatatgtgtatatatttagcatatggaatgtttatccacacacataagcaaacaaacatacgtacacagccaaacactttattattttggatgtaattcatttagatacggaatatttgtaacctaggatatttattaatagaagaaaaatcttaaaaggagaaggaatacagtttctcccaggaatctatttctgcgttgaaatagtaccagatgagctctgctttttwaaaaaaaaaaattatctatgaatgtaattttaatagcttcaaataagttattaggaaaaaattaaaagcagaaaagatgaagcatcattatataaacacagtaaatgtttattgtgcttccacctaagaggacttttaaaatcatttttgctgaaagcttctgttagttgaacagacagtacttcttatgtgaaattgatctgattctctatcggtattctgttttattactaagatgacaggagtctagtaggtccactgccgtgcaacacagatcttttataacctgattgtatttccccactggaggcatttggtgatagagggcataatctttcatggaatttgtgtgarattaaattgtacaagcatcactaaacatcacgtagtttggaaggagggagccagctgagtttgctgtctcgcagcagcgtgagcaggcgcagatgggctgggtcctcactgaaaggcagcaccagctgagcagaaagttaaacccttcattagacagcactgtaatttgatgggcaggagattcacagttcattggatctgttcacccagtccaagcgtgagagccttggtttccaaggaggattgtcatgagttactccgaagttaactgaagaaacgtttgacatcctgttggggttggggggagtgtcctctgacaccctccgccacgtaggaggtgaataataaaaagttattgctttggtggtgccgatgaaatctctgaaacatggctgagcccgaggagagccaggcacacacataagccctaaatggggacttgctttaagagagcaggattctgagatatgacacggggccatttttcctctgaatgcaacttaggattgtatttggttgttattatccacaaaactagactgtctaaactcagagactactgagagcaggattaatttatggtattaagggaagattcttaaagattttgtcctgcttttagctttgtacaacattatttaaagaaagctgaaagcagttgtgagtataccatttcattttgttctttaattgactctgcttttagaagtcatgaataaataggagttaaggacatagcaaattagtgccattgttgaagtgaatacagtaaaaataaattgtcagattyttaagtagtatagtgaatattttggtgtatttgacaacctggatatatcgaagtgcttcatagtactaggcttaaaaaaataactcattaatcagtgctttataggagataatcagaatcaaatcaggctacttatttctagctactttgcttgtaaaaatcatatatgttaataattccatgttaactagatagttctctttgctctatctttaattatgtgacgtttcatattctaaagatgcagtctcaagckggtggaaacaatactggttcaactccactaagaaaagcccaatcttcagctcccaaagttaggaaaagtgtcagtagtcgaatccatgaagccgtgaaagccatcgtgctgtgtcacaacgtgacccccgtgtatgagtctcrggccggcgttactgaggagactgagttygcagaggctgaycaagacttcagtgatgagaatcgcacctaccaggcttccagcccggatgaggtcagtcaaagcacaaaaccgtgggagcttgtcygttccatttggactccagagtcawgaggattcattctttctgggatggggaatatagaggagcagtttatcgtagctttaatgtatgttttagctgtatgtggaaaactgcccaacctattccagcatgtagcctctgacgtagcctgggccttgcacatgcaaatgtgcggccgccacatctcggcacatcccagaacacccagggctggtcacagggaacagcatgagaaataccagcgaggtttactgattccgtaaagtaatttgtgtcaaagctgcattttataaaactgttgaagtttgggactgtccttatggctatggattccgtgtccaaattgaatcatctggtttccatattaaatttccacatattttgccagattttcaatacagggcatttatttcaaaagaaaattggaatgtaaataatttccaaaacctacagaaatggtaagatcttaaacatggtaaattagttatttctaactttacatcactctttgatttttagatcgggaaaattcattattaaatttgtttaattaatgtcttagtatattttatatacagttttgtgtacactttgtccctttaaggtccttgaggtagttctgtaaagtaatcaagccaaccacagaagcactataaaccaactagtgtcttccratactttgtaaaactgtgtcatatacataaataattggtgggggcagggcgtaccttcagtgaaaacaaaaagaaaaaaatcagatctaatgttttaaagagaggagtctggtggttctggttgacgagtttattacaaaagagcgccatcatccccctccataatggaatagaatctcagccaagagacaagacgcaacttcacacccaccaggataacaggaatcaaaaagacagaccatagcaaggactgagaggttgcagaggaactggaacctgcatgcactgtgggtgggattggaacagggtgcagccactctagagaacagtctaagcgttcctgaaaaaattgaacatggaattaccatatgccccgcccgagagacatgagaacaaagacccgtatgttaatgwtcacagcagtgttagagccgggaagtggaggcagtccaaatgtctatcagctatcaaacaagaaataaaatgtagtctgttcgcacacatggagcatcatacagtcacaaatggcaggaaggagccacgtctatgatggcatcgaggcacctttgaaaccttttgctcagtggaagaaggcaggtgcagaaggcaacctgcatgcctgtgtgattccattgccatgacatttccagagcagacagacccatggagacagagagcagagcagcaggtaccagggtctgaggagtgatccccagtaggtagaaggtcaggggtggtggagtgatccccagcaggtagaaggtcaggggtggtggagtgatccccagcaggtagaaggtcaggggctgaggagtgatccccagcaggtagaaggtcagrggctgaggagtgatccccagcaggtagaaggtcaggggctgaggagtgatccccagcaggtagaaggtcaggggctgaggagtgatccccagcaggtagaaggtcaggggctgaggactgatccccagcaggtagaaggtcaggggcggaggagtgatccccagcaggtagaaggtttctcttaggggatgaaaatgttttgaaatagattatcgtgttggttacgcaactctgtgaatatgctgaaatcaattcaattgtacattgtaaatgggtgaatagtgtctccataaagctatttaaacaaaagaagatgcaaagtgagtgtaggttccatgactattgaatgagtagaaaattaagattcttcacaaagacaaagcaaattcataggttaaaaaactaaaatcttagaaagtgttaggaatactgattcaatttctgaaagtatgggtatgaaagctgctcaattctaattccacagacagtggaaatatgagcctaaaaccccactgttgctgatcagcatgtgggccagacagacagggaggcatgtggagaagaggcaggaagaagggtggagaggcatgagagagcctctttccctggtgataatacatcttgcagcagagactcaagtccttgctgtggaagggtgagaatagggacagaccgtagccgccatgaggaggcggagctggcgtgtgtgcgcctcatcatgcacagtacggggcttgcagcactgggaagggcatcaccgttttgctgattaaaattaagaagtcagaatatacaactatgcgttcagaatgtttggaaaattgccttatgagtaataactagaacagatttgtagcccaaagaagacagaacagaataaataaatgtgtgttgataattgaggaggagctatgctggctgcagagctgaccaagggtggcaagcaacttttactttaaaattgcctgaaagcaggagtctcttgtctaggcttctagaagcagaagaattctaccactttatggctcakgaacaaccagtaatgtcattcatctttttttccttgagagttggctgtgaccgtgtcctgacaaggcacaaacttccaggatcatgggactagatctcgtgtcctgaaggcacttctcatgtctgtgtgcagatgtgggaaccactttcctggggaaggaaagatatacacagaagcaagtggtttttaaacttgtctgtacatcaggcagacttccaggggtttttttttgtttcctttttaaaaatacttatctttttatatatgcacgctagcacccccattacagaaatgctgggctggggccagkcatggtgggtcatgcctgtcatcccagcactttgggaggctaagctgagcggatcacctgaggtcaggagtttgaggccagcctggccaacatggcgaaaccccgtctctaccaaaaatataaaaaattagccaggtgtggtggcaggctcctgtaatcccagctacttggaagackgagacaggagaattgcttgaacccaggaggcggaggttgcagtgagccaggatcacgccactgcactccagcctgggcgacagagcaagactcagtctcaaaaaaaagaaaagaaatgctgggctggggctggacatttctccattttgaaaatctaaaaggttacaccccacaattgagaaccactgtattttatatatctttccttttgacttacttttaggacttgaggcgaatgctgaagtttgataaacgggtgaatgtgaggatgtgaggccctcctccaccaatattttaagttttctgtacacttttcgtggtggtgactctcagtgggctcagctgaggttgtccaggggacagatataaacatcccctgatacggtgacctcaggaacaagaaagcctaaatgtgccagcagattcatggtattcgacaaagtataagccacggctagacttcaaggaaaacaagcttgcttatttaaaactttagttacataggcatttttctttttgttgtttagtcaagatactaacttactctaaccaaaatatactaatttagcaattatgacacgtcattagccatgtaagaacctaaaggatggtgaaaaagtagccaaaacgatgaaagtggtttttttaaacatgggaagttgagaacatggatcactcatctcccctcagactctgcggatcacaggttggctttccgtctttctctacagtccgtcgccttcctatctccagataagtatcagggatgccaccgtgatgggacagccctgcatcgcagccagtacacgttcctctctgtcaccatcaccggagcttctgtgtttcattgagcctttcgtgagaatctctgtccccggtgtggctgggcgcacttgcacgcagccatgcagccttccctcgtggcaggcttttgctgtcaaacccgtaatgccttctgttcccgagacctctctgagtaactccgtgtgcctgccgccttccctccagtcattcccatgcacagcgttgagaccggtctgctcacgcgccttcgccgaggtgccttcacaraggtgccttcgcggaggtgctggtcttggcttccctgcttgggttcaaccagtgccccatccaaatgctcttccggccacatcagtaattcatgatggtgggtacatgtggattgggtggtgccttctatggactggcataaasggatcatttactttttcctaaatgcagttatattactgtgtgaaatttctgtagtcactccgttacttttataattattcagagcattttgttcagcaaggctgcgccaagcttgtatggagctgcatcctggcactcgctcgtttgcttcttctgtgctcttccctagcctgacatcccttggctgccctcaccccagaccaggggtccccagctgcccattggcacgcgggactcccatgtgtcttctgggtgggcatccctctccgtgttttcgcaggttctgagtagcaggctttatcttccttacgccacatctgccttcttttcaggggctcacaagcgtcgcctgctgagcgaaccttggctgtgtgggaagatggtgcggggagctactggtcaagtgggaggaggggagtaaaacacatctgtaggaatattggtccttaaaactatattagtggaagtttaagtaggagctagtttcctatagtttagcaaggccatgtcccaaagtttagatggtatttgcctttttggtacaatgtgaaattacgataaagaacttaagttccttcttgtgaatcacattgtcacttccctcttttcagaaagtaattggcaaagtctctgaaaattgggatcagttgaagtattagatttcagaaaagctccagaatacaatgtcgtcatcgtatagagtttttcaactttgaggaaatgtggaaacccaagctccactcttcccactccctgtcagcgcgctgttggctacacctttctgtcagtgggcacgattgttaagcttcctttagccatcagccctgttacagttcatagattgtgttgactgatagatacgtaaaaatctctgtagctaaactcagaaccacgtttggaattggggtgtgtgtatgtgtctcagatccatttatttagtaaaagagaatctgagcgaagaggcgtagttccacaatcataagcaaatatgggcatttagactgacaagacgatgagttgagacttgtaagatttatcagttgctgtcttcttarcattctagtgtgggctgtgagacaaacacaggtcatgagcaaccgctctgtaagaggaagcaagcccccatattcctatcaagaaggggtcgaacacattgttttttctgttatggcattctggaaattctcaaaaatgtcatgtgattatgtattgaaaaagaaggattttcctgccataaatatgagaaacctagactagagatttttcccaaagaaaactgtatttgaagttttaaaaatactgtattacatatttaccatattaccttattccacattttttattcaaagtatctgggattttttatttttaagttttaatataagtcataacactttttgaatcttaaattgggaattcacaatagagatttcattgactccaagattattaaaaatttagagaaactatagacattgctaaccttacagttaaatttttttacttgtctaaaatgtctttctacttgggaaattggacaatgataaaaaatagcagaacattaaataaccttttaaaaatccctaaaacgtattttaaatctgaaaatgaaaacaatagacttcatcataatttttaaagagctctattgatgcaatgtttgcaagtccctaaagcctcaggaaaatcatctaaatggttcattatttagcttattgaactttgctgcagttaggttgacggatgatagtagtgtttcccgatcaccaaagtaccgttttaaaagcattttttatcgaataaagtgcttagaatattgcaccctggagctttatttagggaaatggttcaattgatgttttctatttaacctcagctctgacctatcacaacatctatggttaataagcaacattatcatttgagagacttaactagtttcatccactgtgcacccataccatcctcttaaaaccctgtttgtggcgctgtgtcatctcggtctttaggaaggatgcagtttagtaagtagagtgccctagttttagtcgctgatacacagttgctgttcttcaggaaataagcagtctttgattttcatttttcctgaaggagaaacaatctttctccttacctacacatgtgcatagatgaatctgtattatacaaataattgaattctgaggaattaattttaaatccttaaaggtcctgtgaggcataagcaattaaacacttgaagtgtgatgtgtcttgtgtggtatgtgtggtgatacgatacttgaaggtagatgtgatggtgattgtcaaagtgtaaataactgatttcgtattcataatgtggaacctacttatgccccggtcattgtttcttatgataagtgatcaatatttcattttctctaagagagtagaaagttctgcttgcctatcacttgctctccgcaggctcagcatagcaggctctagctgagcaaacgttaaatgctctctggaagttccctcacagaattaaaattcagccctgtttaactgttagggcatatgtccagtgcagtcgcaggacaccagcaccgaactagtggcatgagccctcggagaaggacagaagctcggtgggcagagcctctgagtgcagagggtgtcagctcaagcgctgaaggcgtggggtggaaggaactttgaagaccgccggcttcttttggtccagaaagagtgactgtgattcttaatgactgcttattcctctagactagctgtttagtagtctcattcttttccctctgtggctgtgttttctcatgttggtaagttccgtatttaaatagtatttcagaatgtagctgtcatcgcctgactccagtatttatttgcaagaatcagctataattaatgacagagcacaagtgggttattaatagtattgcttttgggtttacagaagtaggcactaatgcatgaggcgtgctgtattttttaattcattttatcgtgtgtgcctattgaagcaagactaattgtggggttttgtcagatatatttgtgaggagcaaatcattgtcagtgacataaagccttcacactgtgaccttcaggaccaatagagaataaatactacgtagcctatctgtgaatattgattagcagctttttcagatgatcaaattgcatcttatgttaataattccattaaaatatagagatgattataataaccacaatcaaaaatgatgaaatctcagtgattaaattatgatgtacaaagtgcatggtaagaaaatgtatatttttacagtgtagcgggtagctgcctgtgtgaattgctaatatgataaaggaaatttcttcctagcttttaagaacagtagcacagaaatttctgaataatggaattatagagaattattaatggtaagaattgccccgtattttgtattctctcatatgatattacttctggctgtgctactcttgggtctgtttctcagagtggttatttagcatggagaagtgcaagtgtgtaaacaaatcgcctgtggcagagattacttaactgtgttgctaagcagcctgtgcatgagattcagctcaggttcccacttacatatatttttttgcattcacatcttagttattttttgcctttgaattgtcaagaatcacattattagagatttttgacagctcagtatcagagaactagtcatttgaagtgtactaagcctttaaattctggtctttctgcatttcagagaaaaatatcttagggattacttcctatcataatgtcaggcagcagttaattccatattaatatagaagcacacgaggagtacttgataaactactctgccagttttttattgaatacggacacaatcgctttgaaagagaaaatcaagtgatgacatcggaaacaggattattagagagctcctgactgagtaaagaaaaatctaaatgacaaatggccggtcgtgcaggtggagattgcgttctgtggttgcctgcgccatccctgagagcatccagagaaaacagggaaaaatgtccactgcaaccttccacccgccgcctgaatgtgagggctgcagccacgtgtcacctgctgctgtggagacagaatctgagccgcacacctgagaatttccatccacccctcagcagccttcttcccatgtctgtcctgttggcagctaacatgtttagtatacagtccaaccaaagactgcaaataataacctcaaagaagctgtggcaaagagggcagagatcaaagtggtctctgtgggaaagtagctcttgcagggatccacctcccaaatgtggtcagcagtagcagtgacctcaggacagcagccccaccgcagcgcagccaacacgtcagagagcacctggtaccctcaccagatgccatgtgcatcaagagaaagaaatgaacatatgttaacttggcatcaaactaaaaactcagtaagaagaagaacaaaaccaaaggaaagtgggaggaagaaaaagtaaaggaaaacatacaagtaatgattgagtaagcagtaattcaaaagctgattctttgaaaggttaaatgaaatcggaagattattggcaaaacatagtaaatacaaaacagcgaatgtaaactaagttcacacatatgaaactatccatatgtaagagtgtataataaacaagtaggcttaaatgtttataagagaatatgaaatacagctcaaatgcttatgttttcaaagacagtaaaataagtgttttctrgagaaatataaatttcaaaattgactccatataaatctgagtagacgagaaaagaaatttagaaaaatcacccaaaatggcttttgaccagttttataggtcagttgttttgaggcacaaataaatcatatactgtaagaacttttcttgagcaagaaaaagtttggcaatgatgtctaaggacacaaaaaaagcagaagttytgaaaaaaatgataaattgaatatcagagtaaaacttatttttttcaaaagacatttattaagaaaataaagacaaattaggatttcaacataaatttgaaaaaagaaaataaagataagccagagacttgtaggaaatgtttgcagaatacttacctgataagtgactagtatgctgaatatataaagaattctcaaaactcagtaatgaggaaacatcacctgaatttaaacattggcaaaagatttgaacagctacatcaccaaaagagatatgaatattgactgtaaaataccataaaagtagtgatttgtggggtctaatayagaaaaaatattaagatacatgatgataatagccaaaagtcaagaggcgattgatgtcaatgggagtaaattactctaaggtccttaragtacaggtaaaggtgctgatttacttaractttggtaagttcaggattatgctggcagcagtgggatgactgccaaagagcagtaaaagagcatgtacctctccggggtggtggaaacatggccattgcatggtagaatgcacacagggctccttgcagaaatggctgattctagaaccaaggcaggaaatacccagactgagcctggagcatctggtactgccaggaagtaaggaattgctcaaagccagcaaacaaacagaaaaagctgcctgcatggcaggggatgtgtcggagggacacagaagccaactggaaaagctccctgtggtgaatgctggaacagcatgagcagcaaagtcagttgtactggattatagcccatagtatgaaacaaataatgcatgagtccaaactgatatgaataaataaatgaatgggagagaaagacagatcgcccatgcagaaggattcctgtgcaaaaggatcatgtatgtagctactgaacccgcaggttggggagcataattcctcttcctttaggtgtgggctacacacgatgacttcgtcccaaagagcatggtgtgaaaaggggaaaggaagagtagcttgacgacctcagtcaggtgagtagggtcagcatcagcagtgaaaagtcgtgttgctagatgcagcccccacaggatgtggtcaacagcacctcaccttcatggtcttcctccccagccccacagccccagtctactcgtgagaaaatcatcagacaaataaaactgagcgatacttaacaaaatacccgaccagtacttctcaaaactgtggaggtcatcaaaaactaggcaggtccaagaaactgtagcagccaagagaagacatgaaaactaaatgtgacatcccggatgggacctgggacaagacaaggacttgaggtaggaatgaaggatgtctgaatcaagtatggatttaagcttttaaaaatggaacctgctgcttgctcagattttattgacaacttgaagaaacactgtgtatatgcacctttcagaaaattaccaaataaaagttcagatatgttttaagtgctttgtctttttttgtggttattttacaacagtggtttagccagtttcttctttgtggtatctggcctttagtatttatcttgtaattgtatggaagacacagggtcactgcaggatagcatgacttcagatcccactgtagatcacccagtaatatttcctctgcagaacgaggtgaccactctgggtggtgtggtcttcctttaactcgtgtccttgtgaaattagaaaaatgttaaaaatgttagggaagaaaagtgtgtttctgggcacagggtcatcatgaccagctgtgtggtattctggtgagtgccagcatctcggccacccatttcattcacacctggttgtgccttcactggagggtcttggatgttctgggacctgcagtggaaggaagcaagaaagggcttctcggcttcactttcaggcaagttggagacccatgtcagacactaaaaataaaagttgaggaacaaacattttagcactgttaaatattgtctcttgttaaagacacgtaagctgccttccagaagtgcttcaataagaaaataaaatgcccttgtatatgtagtgtttgaaatgtgagtgaatagagagggaacagttccctaggggtccctgcctctcctggctaatgtgagtgaatagaggaggggccccctcctctcctggctaacgtgagtgaatagggagggaacactgaacagttccataggggcccccgcctctcctggctaacgtgagtgaatagagggaacactgaacagttccttccgtaggggtccctgcttctctggcttgcgttgtcctcctcattgtttccttccctacgtctccacttaacatgacaagtcctgtggctggaatcactgtcctcagtgtctctcccacgttgatagcacaaaaagatttaaggaaaccggcctgaagaatatctgtaccgtatatccatttcatttattgccagaatttagtttctagttcctcgggattaaactgattgtagaggtgatgcatgtatgtgattctccatgtaaataaatctaaaataaagtcctgaagcaaatattgccatgacttctgcatctacagagcttggcttacaggagtactctttgatttaattaatttattattaacctatttacttctttcaggtgatttgcattttatatgcaaataaatggttgagaggcacactagtaacttcagggagagagcgactctctttaaactcagagcccagattgctctgcagcagccctgtgctcaccaggctgtccaggccctggagagtcctgacacggagtgccgagaacgtgcccatttatggttttgcctgtgtcttcagaattccactcagctttccacttttaaatcattttaaataggagatcttttagctttcatttattcaagaaataagtcgttgtgcttgttcctgagtctacatcggtgagcacagtgcacctggacctgtgtggggaactgaggttctgggagggaaggagcccggacctgggagtgttggtccctagaacgcakcggaggcgcaktgcgagtacgtcctctgccaggggaaggggaggggcacacagcactctgatcaggtggtcagcagggccttttggagacctggggttgagccgaaagtaagactgcctggtggagagtgatggggagggcctggctgcgcggccggcactccacacacaccaggggcatgagaggcccagggccaggccagggggacagtcagagaatgggtctctaacaaatgtatttgtcactgagctagctgccgtcagtctccataactgtgtctgttgttggaagataaaccccagtcttgcttggacagcttgattctgaagttgggagttgwaatgacaggttgtctttactggatctgcatatggaccatctggttggctggccatgcagaactcccacccccctccagccctcgttgcttgtagaaccctatcccacttcctcgggatgctgtgggttttacactgggagggagcttacatactaggaaactccgggatgctgtgggttttacgttgggagggagcttacatactaggaaaccttgggatgctgtgggttttatactgggagggagcttacacactaggaaacctccggatgctgtgggttttatgcggggagggagcttacatactttaggaaagtgtgtatattttaatctctcaaacatctttaggaagataatagactcaaacttaycaatcctttacaattttcttttaatttctacatctactgtccctagatgtaagttatttctaagagccttctaaaaagaacaccatgactatatttcagatataccaagagaattcgctaggctgctttcacctagtcaaatccccacacttacgtgctgcagagctgcagagcatgaattaagatatgaaagctcaaaaccaaaaccggagaatctgccgtgtccgtgggaaccagccgttcctttgatgtatcttcaataaggaggaccaggtctgcgtgaagtattgagtacttaggtatgaattcaggagcaaagatgctaaaagtactgcatgtcctcactgaaattatttttcttgtagttatttcatctagcaatttttttttttttttgaggcagagtctcgctctattgcccaggctggagtgcggtggcacgatctcagctcactgcaacctctgcctcccgggttcaagcgattctcctgcctcagccccccaaatagctgggattacaggcatgtgcccaccactcctggctatgtttaattttatattatcgaaattctgtccaacaacaggcaagttacatgagaacagtaattaaagcatctatcatgaaaaatttggatattctttttttctggttggcattatatagagttaatcttcaagatgattacaaattaaaaacaattggatggaatgctgggctaggtataagaagctaaactgatttttgttataagctgctctttgctcaaatggattgtgaaaccaagcataaactaaataataaacagatgtgagtcaccaaatatagaaagctcagtcctgactgcagtggggcaccagtgagatgacagggtgttcacggaaagatgcaatttacaggtcaaaatgtaatcgtaacctttcactgtgtaaattggaaattagcctcaggagcgttggcataatttacagcttgtggagaagaagttttattggaggaagcaatggtagagctacaccctcacttcccactggagatggtgatgcacaggtgccacctccctccccttcgatgggtggtagtcctggctgacccccacgtgccttttttggtaatgtggagtgtatcrctgatgccctgaattacaggactgcgtcatccctagcacaattttagactctyggtgtacttagtaacatgcaggaaagtcggagagggagagttctaattcaagccccgtgggtgacaccctactgaacgtttaacacaggcatggaattccagagttgtagcgtccatagaacggcagtgccgtccaacctctaacccaacgtcagaattgagacagcgagtgttgacatctgccaccattgctgcacggcacaccatcccaaatgtggggcacagaaccattccgacattctcctggccgcaccctcggggcacggtcaggcagcttccatcagtaggagagggttctgacccggattccaccccaggcaggggcagtggggccaagtggcttcagccctggccacatcagcacttcctcagtgagtatgtcctttactgatttctaacaaagcatgaaaattacaagcaaagaatttccagacagcagtttctcacagtatttggcacacattaagcattggatttgctcctatttgtgtaatttatgttcttactaagattcttaagcaaaacagaccaaagtcaaaatttgctaatttcatttattttcagcaaaaggaagacacatcaatcatgtttgagagtgggaagcttcaggtttataaaggtcaaattctaggtgcctcccagagcagaatgttctcaacatgcagcaaagttaaatatggtacttcagacagagtcagaccgtcctgaaatatggtagagactcggggcctttgatttagtcttgctttatgttttatgtcttttttaagtttttaaattttaaattattctgggtacgtaatagtacatacttatggggtacatgtgatatttgatacaagcatacaatatgcagtgatcaaatcggtaattgggatacccgtcacctcaagcatttatcgttgcttcgcgttagtaatcctccgtttatcgttgcttcgcgttagtaatcctccgtttatcgttgcttcgcgttagtaatcctccgtttatcgttgcttcgygttagtaatcctcygtttatcgttgcttcgcgttagtaatcctccgtttatcgttgcttcgtgttagtaatcctctgtttatcgttgcttcgcgttagtaatattgcagttccattcttagttattgtaaaatatacataaattattgtcagtgaaggtcaccctatcatgctactgagcgctggatcttattccttctatccgactgtatttttgtacccattcaccagccccctttatcacccctatccccaatatcctcaatgtccccgatatccttcccggactctggtaaccatcattctactctctgtctccaggagttcaacctttttttcttagctcccacataagaatgagaagacccagtgtttgtctttctgtgcccggctgatttcacttagcataatgtgcccctgttccattcacattgttgtagatgaaagggtctcattctttagtgatggctgaataatactccattgtgtgtacaccacgttttcttcatccgtgcatccagtgggggacacaggctgattccataacgtggccactgtgaacagtgccgcagtacacgtaggggtgccgagatctcttcagtgtactgatttcctttctttgggggatattcccaggcgtgggattgtggattatatggtggctctgtgtttagattgggggtaacctccatgctgctctccagagggctgcacgaatttacattcccgacaacagtgctcccttctcccacctcctccctcgccagcatttgaattgctgtcttttggatagaagccgttttaactggggtgaggtgatacctcattgtaatttttatttgcatgtctgatgattaaaggatattgagcatgctttcctatacctgttggccgtttgtgtgtcttcttttgagaaatgtctgttcagatcttttgcccatattttaatcgaattactcatttttttccgattaagtcgtttgagaatatacaatgatctggtagattctgcttattaatctcttctcagtgggtagtttgcaaatattttctctcattctgtgggttttctcttcactttgttgattgttttctttgctgtgcagtggctttttagcccaatgtgatcctgtttgwccatttttgctttggttgcctgtgcttttgaggtcttattcaagaagtctttgcccagaccaaagtgccctggagtgtgccagcctattaggcacattttcaaatttgattagtggttttagataccaagcagatattacccatataagggygtcttttaatttttcagtccacccacagatacagatgtcaagcagaaaagggttgaggtctgtctgactcactcttggggtgtagttcttcagccagcgctgtgggctgagaccagaccctgccccacatcccactacctggaggaccaacaggtgctgaccaggtacccaacaaattgcactggcccttacatgcagggttgattaataagagtaaaggctcttttcccttaaatatggaaacgagttgtctcacttcagaatgttgcttatagaaaaatagtaattctataccattaagtcttcttaattgctggtctaatatgtaacattttgctgtccctgaatttataaatagttaactatatggtcttatttgtttaaatgaaatttgtatttctagatgataaattcgggctgaggagaaattccaacattgtacatagtcattcctccttcagaaagcaggttttgaagtgtgttcagcagctggggctgtggagtaaaccagtggggctggagagccatgtggggaagatgaaggccgtggccgaagacagacccggtccctgctggaaaagggagcccacaacccctgagcccctctcccaggttctggggaggagggaccccagatgccggaggacacaggtcgtttgtgtgacgcattctttcctccccagtctagagcaggactagctggtactctccctggaaatagaaaatggtgcctcagatcacttctgccctctgggatgcagatgaagaacttgagttgagaaaaggtgtctgactctcccatctcttatgccttttctgtagaagtgcacgtcggattttgtaactgaaatgactgcaaatgtaggatagtagttacagtttctctctcaatactgcttttccagaatcattctattccatatatcataagctcactttactttgtaaacttcttaaaatatgagaaatttgtaaaaggtaaatgctgatagattgagtacgcaccatttgaaactgtataaatatgtgtgtgtgtttattatcctaaaacagttggcctgtttgtctatttaattccttaactagagcctaaaaaatgtttgggaagtcacctgaggtcacatgacagggaaggagcgggggcttttgcactgcaggcctctcaaaagcatgcctgtggggcgaggtcagtggcagtggcacctgggcagccctgaaaaggagggacaggtgcctgtcacctccacgcagcaccggtgacaccatcgcgatccctggctttgctcccggcactccccacttgcacgcagcatctccagagccagaagagacatggcgttaggctgttttccattatctctgcacactccattccttcacatggtgttagggtgtcatctctgtaccctccgtcccctcacatggtgttagggtgtcatctctgtaccctccctcccctcacatggtgttagggtgtcatctctgtaccctccctcccctcacatggtgttagggtgtcatctctgtaccctccctcccstcatatrgtgttagggtgtcayctctgtaccctccctcccctcacatggtgttagggtgtcacctctgtaccctccctcccctcacatggtgttagggtgtcayctctgtaccctccctcccctcacatggtgttagggtgtcatctctgtaccctccstcccctcacatggtgttagggtgtcatctctgtaccctccctcccctcacatggtgttagggtgtcatctctgtaccctccctcccctcacatggtgttagggtgtcatctctgtaccctccctcccctcacatggtgttagggtgtcatctctgcacactycctcccctcacatggtgttagggtgtcayctctataccctccctcccctcacatggtgttagggtgtcayctctgtaccctccctcccctcacatggtgttagggtgtcatcyctgcacactccytcccctcacatggtgttagggtgtcatctctataccctccctcccctcacatggtgttagtgtgtcatctctgcacactctctccctgcacatggtgttaagtgtcatctctgtaccctccctccctgagctcacatggtgttcggtttcatctctgcacactccgtccccacacagtgccctgctgtgtcaagttcaaagcatgaaaaagaaaggaagcagctcttcacacccagacactggaaaatcatgctagaggtattctgtggtcagacgtgtggggaattgcttasaaaatctgattttaaaggtagttcctggtctgcccacgagtgcatgtctggagggctcctgtgagaaagctgagggtagagccctggcatcctcctggtggcctccctgtgctgactgtccactgtgctgactgtccactgtgtgccctcacacctcatttctcgaatccttgctgcagctctgagtggtgcctcggcacggccattctgtagacaaggaccctggggttgcagaggtgcagccatttgcccagggttcggtcctaacctgagcagctggccacagagccagagctcttgagaactttgctacagtctctctaagagtgtgaactcatcctcacaggaatgttcagaaggccctaagattgatttaatatcctgtgcactagacaacatttaaaatgttcctgaagtgacttgagttcttagaacctaagattttaaaactgtttggctgagagtgaggtggaggttaaaactgaaggcaaggacgtgctcatcggaagaggtgggtgagaatgaggttgtggtttaagaagaggactcacccaggctgtgaggggcttcagcactgtgggtggcggcaggcctgcagaacagagaggagaccctgagggaagcagctgtgttactgggctgtgctgcagtggtgtgggacgttgcagagagcgtgctctccatggttagtgtgctccccatggttagcgtgttctccgtggttagcgtgctctccgtggttagtgtgctctctccatggttagcgtgctctccgtggttagcgtgctctccgtggttagcgtgctctccgtggttarcgtgctctccgtggttaacgtgccctccgtggttagcgtgccctccctggttagygtgccctccctggttagcatgctctccgtgtttagcgtgctctccgtggttagcgtgctctccgtggttagtgtgctctctccatggttagcgtgctcgccgtggttagcgtgctctccgtggttagcgtgctctctgtggttaacgtgctctccgtggttagcgtgctctccgtggttagcgtgytctccgtggttagtgtgttctccgtggttagcgtgctctccatggttagcgtgctctccatggatagygtgctctccgtggttarcgtgctctccgtgggtagcgtgctctctctggttagcgtgctctccgtggttagcgtgctctccgtggttagcgtgctctctctggttagygtgctctccgtggttagcgtgctctccgtggttagcgtgctctccgtggttagcgtgctctctctggttagcgtgctctccgtggttagcgtgctctctgtggttagcgtgctctctgtggttagcgtgctctccgtggatagygtgctctctgtggttagcgtgctctccgtggttagtgtgctctctgtggttagtgtgttctccgtggttagcatgttccccatggttagtgtgcctttagctgcataataggattggcataccctatttatctgattaatgtctggtagggaggttgcttttaaagacagacttttatcagaaaataatactttttgtcataaaatactattcacaaattattaactgtaaaaattgctcttccacttgtgattgttaaattttaataagtcaataaataattatcaataagaatacattctatttctgagtacctgccatatgccagagaatcactcatgttattttggcctcaaagcaatttggaaggccatttttccacatgacagaagaggagcgtggccccagcagagtgaagacctggccacaggagttccgactttcacacttgggcttagaacccaggcctgctttctccttgtctatcttgtctcctttaagtttgcaaatattacatgtagacacattaatagagttaattagtcaccaatttgtctcttattttagaaaaataattaccataaacatgagattcaaactatttcccctttcatggtgtccatggaactggggrgggagaaaccttgaaaagtcgtataacttgctccctgtccccagactgatggggtgagctgcgttctcaattttaaaaccatctggctctagggagcaattaacacaaattgtaaagaaagtctttatgatccataatggtctttattttaaagaataataccaagtgacttttgtgatattgcttaggattcctctagaacaatgttattcaaacgtatatacttagccgtgaaaacaaaaagttctgaacacctaagttcttctgcagctgtctcatgttggcaagctttctgagcactgccgtgctggctcgcctgcgtgcggctttcctgaggcagcggtggcctcagttgttgctggtctcccgtaggtcgctctggtgcagtggacagagagtgtgggcctcacrctggtcagcagggacctcacctccatgcagctgaagacccccagtggccaggtcctcagcttctgcattctgcagctgtttcccttcacctccsagagcaagcggatgggcgtcatcgtcagggtgaggctgcggggagggtgccacgcgatggcttcagacattttgttttcacaccttttaaacacagattttcccaaaagaaagttaarcatttactcaggtgctttatgctgttacagttttgtttgttttttttttttaatgaaatctaagctaataatctatatctgggaacctactgtgtctctagtgagataaaataattctcctaagtcaacctagccagaatcaataatgtgggatttattaatttttgaaatcaacaactaaagctgttttgatttcaacaaaaataacatgccaaagagtttgacttttgtacattgatttatgaccataaagttgccaaaacgtaccttaatttttttagcaaacaccaaaatcatatcttggaagttgactaaacaatgaagcattaaatccaactgtaaaagtttaagagaatgaatgcaactcaaatcatattcattaacacactcagaccttcagcctagcatctcaggatgcacaattatgttctcagtcctgattgcactattgctgaagagtgggcctagccctccgcgtagaaacacgtgtgaggagcttaacacacaggaacacattcataggaattgctttttccattgtatgttttattagactagcagttatttgccccgagcaatgcagcctaaatgtgcctctgtttatttttgttctttgataggatgaatccacrgcagaaatcacattctacatgaagggcgctgacgtggccatgtctcctatcgtgcagtataatgactggctggaagaggaggtatgtgagtgactctagcgtggttcacagtgtttctatggaagaggaggtatgtgagtgactctcagcctggttcacagtgtttctrtgaactttattgatagatgacaggaaraggatatcctttccccagcttgcagacactggtatcattggatgaattgagctgtcaaaatgtcaaaccagatgctgatgggaaccacataggttgtcaaacacagtatcattttatactaaattattttaagtgcttgcagttctcaatttcataaaggagaaagggtaggagtcctatctatttataaatagtttacccttttttttttttttgagacagacacactgtcacccaggctggagtgcagtagcgcaatcttggctctctgcaacctgcacttcccaggttcaagcgattctcctgcctcagcctcccaagtagctgggactacaggcacccgccaccatgcctgactaatttttttgtatttttagtagagacagggtttcaccatgttagccaggatggtctctatctcctgacctcgtgatccgcccgtgtsggcctcccaaagtgctggcattatatgcatgagccaccatgcccagccaataatttactttctgtrtaaataacaatcatttttgttttgtgtgtgagtgcgtgtcaatctatacaagtaggtccttacaaagaatattttgtttataatagaaatagaargcattatcaatcattcactattctgaaataatactttatatgtaatcaaagttatattttaatgtatctcttttgtaacataaatatttgcaagattttctttagaattttaacctaatgctaatttgtgcataaggttcacctaaaattagaacataagatacaaataataagcaatcccatatttcattaaattytcctgaagtaaataggatttgtaggtagcctcatgagatgattttatcgttaagcttatgtataaatcagtagttggatttccaagtaaaatggagactgttgtaattgtagtaaacatggccctttttcctgtgtgcgtgttgctgttggaattcagagtctctcctcccaccctgggacctcagagatggtctgtccgtgcagcctccacaccccagtgttcgcaacggtagtggcaatatgaatcaatatctccttcngggtggtttgatttaatcagggacntgaataaattaaactccctgaagacctagtaaaatgccataaaaattacttttggtcataatgatgtgcaattaattgtaaaatacttctttaatttatttagctttatgaggccaaatcaataaatgttttgcaacasacagatgatgtcagaatgtttttcacaaagataactttattaaaaattctatgtacatttattttttcaacattatattttctttccttggataaattgttgtcccttcaccaatgtctttgttgtggtactactatattatgaaagcctttcattttattaaaaacgaaatgaggcagcagattcttcgagctggagttaaaagtgtattattctgcttccatcaggctcctccagaactgaattcttggcttgtcaaatgtttaaaaaaaaaaaaacttttcaatgatcacataacagaaagaaccagtttatgcaaacctgagatgtaagaatatgtaagtctgtgaacagacttaaaatagtgatgttccggatagctggaggtgttgaggtgattggcttccttccctctaaacacaaacctgagttgggccctggacattgtattgtaaaggaaacaagtacaggtgacccttgaacaacacgagggccaggggctccaaaccccacacagatgaaaatcagcctatcacttctgactccccaacacgtaactgctgatagcctcctgttgaacgaagccatactaataacatggataaatcgattaacacattgtgtatgttacatgaattatattctgcattgttacaagaaagtaacttagagcaaagaaagtgttattaagaaaatcatgggctgggtacggtggcttacgcctgtaatgccagcactttgggaggccaaggcgggcrgatcacgaggtcaggagattgagaccctcctggctaacacggtgaaaccccatctctactaaaaatacaaaaaattagccgggtgtggtggcgggcgcctgtagtcccagctacttgggaggctgaggcaggagaatggcgtgaacccgggaggcagagcttgcagtgagccaagatcgtgacactgcactccagcctgggcgacagagcgagactccgtctcaaaaaataaaaataaaaaaattataaggaagagaaaatgttatctactcatcagtaagtgggagtgggccatcgtgaagaccttctgactttcttcctcatggtcttcatgttgaggaggctgaggaggaggaggggttggtcttgctctctcaggagggcagaggcagaacaggtggaggaggtggaagcggaggcaggaggggcaagctcactccgcataaactttactgaaaataatctgcgtaaaagtggacccacgctgttcaaacccatgttgtttaagggccatctgtagttaaaattgggaacgacaggaggtataatgaatgacagccttgcctttgtaattcacagtaattgtcacttcttttgtctcctgtaacacatgaccctatagaggtcactattccaattcctaaacaggagacgggaagagacacagctgttggatgcataaagaagggtgctagacccacgcctctcctccagcccttcctgccatccctgcagcctccagtccaacgtcaaatacaatcaactggatgaattaaaaagaaattgcaaataatatgaagagttcaataatgtttatttgcctacagattaaccttgatcagcagatacagtacactggcttcattagagtggggcctcccacatggagggctgcctgatgcccaggagagatgatgggtggtgacagggtctctgcgcgtgcctggggggccgtgatgtgtttccaaatgtgcggctgtgcccgggtggtttctcagcacttttcctgggcagtgctgagaaaggtcagatgcccaaagtcccagctgtctgggctgcaactgccatctctggctttctgttgctgtctgaggagctggcctctccactgcatgtccaccccaagggctggcggagccttccttagggacactgtcatgttcttctccctgccatgcagattctcagtgttcagcacaacattgcacaaaccaggtttactagtatttgatcttcttttccgtaaacaagtgtagctaattaacttgtttaggatatccttgcttaagtgtctgcattatcaatgttcacatttttaaagttttaaatatacattgaaaataatgtttttgattagttgttctctagctgtaacgtagagctttattctccttggaggttaccaaaatagcctctaaaagacctctcccctcactgtgtgtcatggtggcagggcaggtcttggaggttaccaaaatagcctctaaaagacctctcctctcgccgtgtgtcatggtggcagggcaggttagcagctgcaccacctctgcgggctcattgcggccgtagctaagttgggagtgtccacctgagctacagaaagttcctggggcttcaggaagatgtgattaccactgatttctctgtattgtcaaccccagtgtcagagacaggagctttataaacatggttaaaatttgaaagagttgctcaaatttgaaatttgagagggagtcaacaacatctggatggagagtcttaagcagcgaatctttcgggaccttccagagcacagagaagccctctctacagggagggtcactgttaaagcatcttaaagtatgttagccctaataagttgaaactgctaggctgggcgcggtggctcacgcctgtaatcccagcactttgagaggctgaggtgggcagatgatgaggtcaggagagcaagaccatcctggccaacatggtgaaaccccgtctctactaaaaatacaaaaaaaatagacagggtggtggcaggcgcctgtagtcctagctgctggggaggctgaggcaggagaatggcatgaacccrggaggcagagcttgcagtgagccgagatcgtgccactgcactccagcctgggtgacagagcaagactcygtctcaaaaagaaaaaaaaaagttagaaactgctagattcaaaaattgatagtttggacagttatacagcttagtgttcattactttggtttttttaatgtactttttatagaacacaccacagctttaaagcttaggcacacctcacccagcacttagtaatcaattgtagggcctctctgtatccctggaagagagcccggctgtcctgagccccgtcctggtccacacagcagaggggggtggggttgtctcctgacagccccgacaccccctggggctgtccgggagcccagcaccctccacccctgcctcttgtctgcatcccccagacgttggccccttgggcaggaccgtgtgtgctcacagctaagtcctacacacgcctggcccccaggagacccaccggcgccctccctcccacatctgcccagacgcccaccccccccttgtgccggataggagacccaccggtgccctccctcccacatctgcccagtcgcccacaccgccttgttccaggtaggagacccaccggtgccctccctcccacatctgcccagtcgcccacactgccttgttccgggtaggagagcggggtgggtttgtttcttcacctgccttgcaggaacacgtgccctcacgcgtctgttcctgtggccgcatgaggcctgtccctctgggtgtccttcacgtcaccacaaccacgtgagggaggaactgttttcactttgcacacaaggaaatggcacagaaagcgcagagttccagaagtggcttctgccgctctgccagattctctccgctggctatgtggaaatgcaggatgtagctattaactatgagcaggctcgttcaagccttttaaaacctgaccctcgttcatgtaagcaatatggcagcgtcaacctcgtgtggacatcagggtctacttttgtaagtgcagtttgaacttccaggactgggatgtgtgtcactggtatgagcagtttaactttgagagtgttacctccacacaggtttgctcctgcaccacccctcagccttgtcccagagagcctgtttcttcacccatcaccagctaaaactgttgcacttttacctctaatgggaaagtagtgttttttattttgacaccttccctgactgaacacggttagcaccgtttcatgagctcattgcaggcatttccatgtcttgctttaacacgcacatcaggccccgtgactcctgcagggctcccccaactctggaaggcgaatgcagggtgaggcttgtgagctttgggatctggccgtgtccccaccaaccccagctctcaccgcggccctgcactcctgccctcccctccatcactaactgcgcttactgctcatgattggctgccctgcaaggccagttacatgcacgttaaaaatagagcaagaagaacttacgcagattcacggagttagtcccagagcaacactcttatgagcccatttctatgaaggaggaaacaagtacagaaaaatgaggtcgtttgcccaaaaacacaaagtctgtggcagaaacaggtttccggcccagccacctggttctaaatccatggtattacaacacgccaggggggtccccctctcccccagtgtacaccaggagccctccctggcaccaggcgctcccctcgcccgtccccagcaccgccgtgtgcacccwcyrtgccctccctggcaccaggygctcccctcgcccgtccccagcaccgccgtgtgcacccwccrtgccctccctggcaccaggcgctcccctcgcccgtccccagcaccgccgtgtgcaccctctgtgccctccctggcaccaggcgctcccctcgcctgtccccagcaccgccatgtgcaccctccgtgtgttcttgctacatgcaggctgccgtccacactctggagtggtggtgtttaaggattcagggtatgattttttgaaaagcccgtgctgtggtaaaaagaagctctgctaggcaccaggagagtccaggtggagtgtgccccaactccatccagtgtctttgcctctcgagtgaaggggtcagtaggatttgagataccagacaggtcgggaggttaaaaggatgcattgtatgtaaaggtgtccctctgctgagttgtctctggccttggtgatgaaggtgggcacaggacatgagggcagggcaccagcaatcagagtgtggcactgccctggccccacacacggccacaggggctctgcagggcccacctgtgactcggcctctccttttccagtgcggaaacatggctcgcgaaggactgcggaccctcgtggttgcaaagaaggcgttgacagaggagcagtaccaggactttgaggtragccgactcccagccatcccatcctcctacgacgtttccttccttacgctgaaattagttcttcctgtctttgtatgaaattagagctgggatcgctatagtctaggagtgaaggcagcttcgctcagcaggagcatggggtgatcctgtctgcatttctgtttccaccatttctccagcttgctggggaaggagggttacagaagcaaagaagtgccagtttccttagaattgtgcttgataactcctcaatgatcacagtccwgccgagctgagtacacatagagtatgtgcacataggcgcctccccctctgtccccagagcccatgctgtccagctctgtggagtacacacacggagcacgtacacgtgtgcacacaggcgcctcccactctgtccccacagcccatgcagtccagctctgtggagtacacacacagcacgtacacgtgtgcacatagtcacctccccctctgtccccacagcccatgcagtccagctctgtggagtmcacacacagcacgtacacgtgtgcacacaggcgcctccccctctgtccccagagccgatacactcaagccaagctgagcatgcacgacaggtccctcaaggtggccgcggtagtcgagagcctggagagggagwtggaactgctgtgcctcaccggcgtggaggaccagctgcaggcagacgtgcggcccacgctggagatgctgcgcaacgccgggatcaaggtactgcaggctcacctctgctggcrcgcrctgcttttgctgaagcaaacagtgcttttccttgggcatggtgatttgtgaaactcctgtggggtcatggatgtgagagagctctgtaagcagagctgcccaccagctcccctccttccttagggacatctgcagytggtgcacacacaaatccccacgccacccctactccagacyttcctctytacacctcttccctctctggayaccccagcctttytaaagaggagtcctggtcccagccctggcgatgtcaaactgccacatgccatttcccagggatggttatgcaccccccacaggacgcatggagccagtgcccgtcaccctggccaccgccggccagatgtctgcagccattcctgggttggccggcactcgtgcccttgcccccagcctgtcacaaccctgcacctggcaaggctgggccactgtgttctctgtgtaacctggcctcctcctgcaggggtctctgtgcctcccctgtgagcacagggtacgtccattgtgacggcacgtgttccatgaggacgggagtgcatgagaacccagacctcatgggcttcggcttcattctcggttaaattgtgccacatttggaatcatctcatgcttcagggcatgttagagttgagaatatagaatactcagacgtgcactacatctgttcattttattgatgtttttgaagaaataatgcatccacattgtcacaaactcagcacaaaaggacacccagtggaagctgcttctcacttgtgcctggcccctgggctcagcagcaagagcctgccccagagacgcctggacgtacagggcaggtgcaaagctgcttgtcctccctctggctctttgttctctcccagcaccttctccgtagctggaggacaccccctctaccttggctgtgtggcttatgcccccatccccaccatgctcccagcagcagtatcccatctcccagcaggcagtgcccaccttccctgaactccccaaggcagtgccccgtctcatccagctgtgtggtccttggcagtttaaatatggtgtccgtgaaattcgagtgtttatcttggatgggagaggttaggcatcctgaccatccttcttggtggcttcccccagatgctgtgtggcggggcacacgctccctgcccrccgacctgctctctggctttttcacttactgatgtgtcctcttcctgcacaggggaaattggcacttatggtgtaagttttatttttcaggagctttcctcacatgttctcattgaagccgaaaggtcaactgcaaattggttaagataatttatttcagcactgcctcaaggacctgggactcagaatgggaaaaagtgtaacttggttttcagagaaaagctgcatagctagactagagggacagaactgaaggacagtgtcagaagtcaaagctgtgccaacttcagttaaaaaatacatcccacaagccttgatgaagatgctgtgccatggacagaaaataggcatctgttttccttgctgtctagaggtctgcatggtgaagagacttgtaagatttaatgtccttctgagatcgcagtaggaagtatgtcatgttcgcagtaggaagtgtgtcatgatcgcagtaggaagtgtgccatgatcgaattaggaaatgtgtcatgactgaagtaggaagtgtgtcatggtcgcagtaggaaatacgtcatgaggctgtatcatatccatctgagatcacagtaggaagtgtgtcatgatcatagtaggaagtrtgtcatgatcacagtaggaagtgtgtcatgatcgtagkaggaagtatgtcatgatcacagtaggaagtgtgtcatgatcgcagtaggaagtgtgtcatgagactatcatatcygtctgagatcgcagtaggaagtgtgcatgattgcagtaggaagtatgtcatcgcagtaggaagtatgtcatcgcagtaggaagtatgtcatgatcacagtaggaagtgtgtcatgatcacagtaggaagtgtcatgatcgtagtaggaagtgtgtcaggaggctgtatcatatctgagatcgcagtaggaagtgtcatgatcgcagtaggaagtatatcatgattgcagtaggaggtgtgtcatgatcgcaataggaagtgtgtcaggaggctgtatcatatctgactgagatcgtagtaggaagtgtgtcatgatcgcagtaggaagtgtatcatgattgcagtaggaagtgtgtcatgatcgcagtaggaagtgtgtcatgaggctgtatcatatccatctgagatcgcagtaggaagtgcatgattgcagtagaaagtatgtcatgatcgcagtaggaagtgcgtcatgaggctgtatctggtttcagagtaattgttcatgtagaaattcaaaattacaagagaacaattctgactcagaaagtttagattactaaacttaattgtattgtacagccaaaaagttgaataacgaagtgtgattaatgagaagcagatgagctgggtgtggtgctttgtgcctgggatcccagctactcaggaggctgaggcgggaggctcaatcgagccccagagttcatggcaagacccatctgtaaatcgacacatgaatgagcgagcatatgacccctgcatttcactgtaactttttagtgaacttcacctcagtctacttcctactttatatgtgctagattattagtatattaaagtagtgaatatcccttgcattaaaatttggatctttacatcaattatttgctaagttatatgactttctcgagttttgctctttattctttacattatgtaaagtctgacttcagatgttcctctgaaactcgaaggtgattttcagcgggacctcactgcgtttcctgaatcccactcaggttgccgcagtgctagttcttcttcaactttgtcatgatgatgtgtcatactcttaggtcccgtaaatgaatataagtctgtaaaataaataaaaagcacaaatcttagacactgagaagagccacaggtggagcgtgcttaagcagataatcagtacactgtagaagttttttttctgcttcctgtttccaaaaatgcatatttcaatatgatacataagaaatctgagaaattcagctaatgagaatattactggaagttctttgctgttatatatatcaaatatcctgtcatgtattaaatatcctgatattttactctatcgtctaggaatatatatacacataagatgtgcatgggtatgcaatttttaaatgtaaaagtgctactatttgacatgttttatttgacataaacaacttttggtttgactatgggccatttacccattgaacctccrtttccaactaaaaaactagcaaactgcagtgaaggtcttcatgagcctcccagcctggcaaaccctgactgtgtgccgccttggcagtcctgtgtgcttgctttgtgtggaatcctttgtggtaggcacctttgacactcacagctatccttattagacttagcctctgagtgccgggcccaggtgttactcacatgcctccatatctcagctgctgtatctacacatcactgtgctctcgcttgttccaccttagcaagttcacatactgtttaattgtggttggatgtgtgtagcgtgacctcgttgaagtctgtgttgccgacacaccatttaattgtggttggatgtgtgtagcgtgaccttgtcgaagtctgcattgccgacacaccatttagttgtggttggatgtgtgtagcgtgacctcgtcgaagtctgtgttgccgacacaccatttagttgtggttggatgtgtgtagcgtgacctcgtygaagyctgtgttgccgacacaycatttagttgtggttggatgtgtgtagcgtgacctcgttgaagcctgtgttgccgacacaycatttagttgtggttgkatgtgtgtagcgtgacctcgttgaagcctgygtkgccracacaccatttagttgtggttgkatgtgtgtagcgtgacctcgttgaagcctgtgttgccgacacaccatttagttgtggttggatgtgtgtagcgtgacctgttgaagcctgcgttgccaacacaccatttagttgtggttggatgtgtgtagcgtgaccttgttgaagcctgcgttgccgacacaccatttagttgtggttggatgtgtgtagcgtgacctgttgaagcctgcgttgccgacacaccatttagttgtggttggatgtgtgtagcgtgaccttgttgaagtttgcgttgccgattcttgtgcagccatcaccaccaccccttccagaactgttccatcctcctaaacggaaactgtccatctccccattccccttcccctaaaccctggcacccaccatctagttctttctctgtggattggatggctctagggacctcatggaaatgggatcatacagtatttgtccttttgtgactggcttctttcactcagcgtaatgtcctcaaggttgaaccacaatgcagcctgtatcagaatttccatcctttttaaggctgaataatactccattgtatgtatggaacacattttgctcattcatttatctattgacgggcacctgggttgcttccaccttttggctgttgtgaattatgtgagacatcagaaatgaacgtgtccttgtcttgttgaaattcaccagtttaaattgttccctagatatggatgctaacaggcgataaactcgagacagctacctgcattgccaaaagttcacatctcgtgtctagaacacaagatattcatattttcagacaggtaagtatgtatyttaatcactttgaatttttaaacatttgtctcacacaaacgaakcctattgtttttgtcagaatatatatttattaatcactaaatatctttttaaaaagaactactgtaattttttwaatttataacagcacaccagcatggcacatgtatacgtatgtaactaacctgcacaatgtgcacatgtaccctaaaactttaagtataataataaaaaataaataaataawtaattaattaaaaagcatgttaaaatagatatttttagccacatacattaatcatgatcaaagstgctttttgacggaatgaacaagctctaagttcagaagtattttttgcttatactattagtattatttgctattttaaaagaggcatactgcaattattttcaatttgtaaaaatgtatattgattaaaaaaattacatttttctacaagttatacgtgttacatgttgtccagaagctgctgttgtgaaacaagctataaatacaaaatagaaatgtgtttttaatcactgccattttcagagcaagtgctgccttaactagttcaaagaaaattaatagaaatgatctaagtttatgtgtttactgtatgtattagttatgactaaatttaattcaaacaaaaaataagaatttcttggtcttgatttatggtgagtgaacagacattctgtgtctgcgtctgttctaaatgaatcgcttgcacctacagaaggagttatttgaatataatttatatgtaaatgtagtttgttttgaagcatcagaatcacaaattaggccctgaagactactatttgcaattaaattattaatgcttctgataaaacttcagatcaatttttgttgacttttcagtgttatagcaccacaaattaaatttttcacaataaaacctacctatttaaagatgagtctgagattgttaatttgaaccacatgaagcttttaatttatttcagtcctattaataggactattaatatatcatttcttttatgctccataaaatctccacagaaggaatatgaaaaaccacttacattggtttctgaaatatttttgttctaaaacaaatgatatttcaagattatgacttacttttactcttttaggtttttttaaaaatccctcagacactgggtaaaaactaaactaatggagtaagttgaaacccatggcagagacaacacaagcaattaagtattttgcattatttgacctattatgaaaagagatgtatttacataacaccttgatttgagagcgtcctgtctcttacccgatgtgtggcgatgatgtgtggcgatgaggagctcggcctccctgggctctggtgctctgttgggtgcaagcctcgttctgcagagccgtgtccrtaacgctgcgagtcagtgactctcagcagcgctgctccccacgccagcctaccctggcctgttgctctgttaaataatcacctcgtgggaattacaagaaaattcttaatcattatcgttgtatgttaagggagtgtatgtataaaaggcaattaccctcccaaactatccagaaggtaattattaactcataggcaccctttacacaaatttcatcagagtggtgattccactgcattcctcactatacgtttcctgcttgcagttgccacaaatttgaaaatgattggcgttaactgagtggatagacacacccagcactgctggaggaattggaaaggaccttcttccgggtccaaatactaaagctcctttggttttagataataaccccagaacattccactgtgactctgcaaataatgccctgtttctctgtgcctgtaacttagacaacattttaatttgggattctttttctcccttaatggaggtaaccagtcggggagaggcacatttggagctgaatgcatttcgaaggaagcatgattgtgcactagtcatatctggggactctctggaggtaaggctggaccctgagtgagtacatgtctgtctgtgtctctgaggcaaggctggtccctggctgagtgtctgtttgtctctcaggcaaggctggaccctgagtgagtacatgtctgtctgtctgtctgtctgtgtctctgaggcaaggctggaccctggcccagtgtgtgtctgtctgtccattccagtgcatcaaggccttcttgagtcaagtgcttttgcccattcatgctgtttttaggcagttttccatttcgtagcagcggtatctgccgctctggaaagcagccccagcctgaggagatgtcagagctggatcacagcgattgttactcctccttgacacattgagagcctgaaagctgggctgggtcgcagtgattgttactcctctgttagacattgagagcctgcaagtgctgcaggagacctggaggaggagcgacaagagcctgtccagcgccttggttctggctctctgtcctctccatgttgcatccgctggagcaggaatgtccaaagtagcttcatgcctcgttttcttcgcacggtggcccccggctgagggaactgtggcaccggggctggtgggagcctccccctgcacagcttttgcacaggctcctgggcttaatcgtcctggacctctgttgttgctagtgtcctcagagcaagcactccaagaaatctggcagaagctgccccagaacgtcaccgggtcacatgatgtttttcaagaaagtcactaaggcagcttggattccaggggagggggatcagaccagaaggtcatgtcgtagctcaaatcatggaggattctctctggtacttcaagtggaagaacttccctaggcaggagaaggatggttccatgttacatagaatttcttcccatgattttttattttcccctgtccgtgagtcctgtgaaatgattcacagaaaactgaaaagattgagaactgtggcgtctgttggctttgctcccatggttttgcactttctacattacacaaatctgggacactgttgtcgaccataaggcaaaataacacaggctttgttttccaggtttgtctaaagtactacgagcatgaatttgtggagctggcctgccagtgccctgccgtggtttgctgccgctgctcacccacccagaaggcccgcattgtgacactgctgcagcagcacacagggagacgcacctgcgccatcggtgagagccgcccaccctgctcacagggaggtctccagagaaacccgtaggctgacattgatgggcaaagtttgttccatctctaaaactagattgatttcatctccattcatggaagtttctgaaatagcttctgayggtaaaaatgaaaaacgtgatgatggataaggttttatttcatctcasttttcttgcttcgcaggtgatggaggaaatgatgtcagcatgattcaggcagcagactgtgggattgggattgagggaaaggtaggttcgcccttttatcaacacattagcacacagtcagcacacatcaacacgactcagcacatgctgggccactgtacactcagcacctacttggtcagtgcacgtcagcatgtgcttagcgtacgctcggtcagcaaacactcagcacrtgcttggtcaacacacatcagcacgtgctcagcgcacagtcagcacacactcggtacacgctcggtcggcgcacgtcagcacatgctcagcgcacagcacacactcggcacacggtcatcacacgtcagcttgtgcccagcgcacagtcagcacacactcagcacacggtcagcgcacatcagcacgtgctcagcgcacagtcagcacacagcacacactcggtcagcgcacgtcagcatgtgctcagcgcacagtcagcacacacggcacatacgtgctcagtgcacatcagcacatgctcagcacatacttggcacagtcgtttagcacactacacatgctcagcacacggtcagtgcacgtcagcacatgctcagcacacttggtacacttgtttagcactactatgcttggcacacacttggtcagcgcacgtcagcacgtgctcagcgcacagtcagcacacattcggcacacatttagcacactacatgcttggcacacactcagcgcacctcagcatgtgttcagtgcacagtcagcacacactcggcacacactcggtcagcgcacgtcagcacgtgctcagtgcatgcctggtcattttacactcagcacatactcaccgcatgcttggtcggcacagtcagcacatgctcggtgaatgcgcacttggtcaacacgtgtggtcagcacacagtcagcacagcctgaagagcctggtgtgtcccgggcactgaactgtacatttgaataaaggaggaattggtcggagtcccccgctttgacctcacatttcataatgtcaatcctgccacgtgcattacagcctagccctcggcgacttgctgttggcggactggcgtacagggaggtgtcactcttagtcacctgccctagggctcagctcagatgttagcagatccctcggcgagcctttccatggcctccctcctgttttccacgcaccattctctgtgtggttgcctgtgtctcctggccaactgagctgtggtttgaggttcatcttccgtgccagctttatctgtgttactctctccttctccacagtcacttaaatattaatacagacacacccagaaagacctggaaaattcacctagctcaagcaagcgtggctttttccttggctacttcattttgtaatgccttacaacagcgttgtgaaagaggggatagattgtttcttcaaatatgaaaaaacagaattgtcttgaagcagcccaagattataggggtgtcctcccacagggctggcccatgtcagatcataggggtgtcttccgacagggcgggcccacactcagatcacaagggagtccttcaacagggctggcccggactctgcagctctgctgactcctgtgacacctatggyctgtcagagccgagctctcctgaagcacttgtgagagcctgggctggtgctgggggctcttcctgccyctgtgtctgagaccataggacctgtccccatcgacggagctgaagctttacaagttctgcagagagaatttcggtctttgtaacatttaggctgagttctaaaactcacttttggagtctgatttycagcgtccgccatgtttgaaaaggccccgtgtgcttttctctcaggagggtaaacaggcctcgctggcggccgacttctccatcacgcagttccggcacataggcaggctgctcatggtgcacgggcggaacagctacaagaggtcggcggcactcggccagttcgtcatgcacaggggccttatcatctccaccatgcaggtactaagycttctgtgctggcacccatggarggcagggtccaggaagggcagggtccgggaagggcagggtccgggagtgggggtgctgagtgctgccggaagtacctgggctgtgcttaggagttagcgaggcccctgagaggcttggggccacaggtgctcgtggaactgacagttgtcttcgtctgtgggctctctctccaggctgtgttttcctcagtcttctacttcgcatccgtccctttgtatcagggcttcctcatggtggggtaagttacactcagaacctgccagctcatccaggggaggacttctattttgaaaaaaaaaaaaaaammaaaaaacgtatatagaagattcttgatacagtcatcatttagaatgaataatactgatgtaaaaacaacattttacttgggtgaacttcaagacagcacctgcacacttgttcctcctgggattttcttattagattttgttttcaagtggaagccatagtttgtgtcaggaactgtgttggatctgagatttttaaagggtcccgtggcagaaggcggaggggcagagtggccactgacaggccctcccggctctctgcaggctgccctcccctggctggggcttcatcctgttgtgcggcgtggccagcagcaaagagagaacaggaagtgcagggacatggtgtggcatgcttcgaagcaaacactgttggtctctcctgggcaggaatggaatctcattttcaaagatagcagcaccagggctgggcgcggtggctcrcgcctgtaatcccagcactttgggaggctgaagtgggcgtgggtggatcacctgaggtcaggagttcgagaccagcctggctaacatggcgaaaccctgtctctactaaaaatacaaaaaaattagccaggcgtggtggtgtgtgcctgtaatcccagctactcaggagactgaggcacgagaatcacttgaacccgggacggggaggtttcagtgagctaagatcgtgccattgcactccagcttgggcaacaaagtcagactccatctcaaaaaacaaagataacagcagcagtgtcttagaaaaggacaccaaaagcacagcaggcatgcgacgtgcattgaaagctgagctgattttgctgctgtatctgcaaaacaggagcttcctgtgaagagggaataggtgggaatttctcttttcctcctcctctgtggttatgactagaaatgaaatcagtgtgactgttggtgttggcagcaaactaaaagcagcctctcatctgccactgacctccctgacctctgcaaagctcatgcccaccttaaccaggttccactccacaaagagtctcagaaaatacttgaatagtaacagccactggcttcgatgctcttggcgttgaacgtgctttcatcctcaccttgtccccacttcatgtgtgagaaaagtgagagacccagagagctcaggaactcacccgtgggaggcccagctcagacctgagttgtcaggggctggcgccgggtgctgctcctcaccgtcacgcagccactgagcttaccccaggtccacagagaaacagagtcctttctccctgcatagctgtttctagtccgcagtctaaacaccgtttcactcgacagctccctgaatcccaggagttcctcacaattttagcaaaatacagggaaatatcagtctgtgcgtgtgttaggtttttgttaaacatgtgaggtcctcttaagtcacctttttcctgagttagaatcactgagaggcgcccccgtcatcctgagctgtccraggagcatgcacagagctggcacttgggtctctgccttccttccgtctccagtcttcaggtcctctctgtcctctggcctccacacatgatgtccccttggcctagaccactgccagatgtccccattgtccttgcttycctgggaggccccgcacccccccccccaccatgcaccttcacacccccaggctgcgcagttgtattaccagttagcgtcctattctcctgcgtgctctacaaggacaaggcacaaggtatatcgggtcctcgtacctgctgtgagtttgtcagcgtgaacttcagtgcatgcgaatttcagaggagggccagactctggcggattctaggccccccaccccaagcctcaggacagctgagctgtggggctcacagctaccaagactcctggggcacctgcttcggactccacgtccttcgcctgcacatgttagcaccgttcctcccaagatagcagcagcctgtcctgtggtcttaaaaatcactttgaataaagtaggtaagagcctagggaaaccttcgcaggtgtcttcaggcttctctcacccctagcccttcatcttggcacaagtgcctctgttttaggcccctgcctgctgtaatcactcagggaataacccccatgatcgtaagcattgcagactctctttttgtggcccacaaggaaagcgccgtcatcggccctgggctytcctggccgctgaggctccctcagccccagtatgaggtagcacaggacagcactgtgcgtccatggtgtcaacttgaaccttatttcatgactytacgtgaccaaagaatgtcccagcaacctaccaactcatagcccatacagttgatggaaatggtggtaggatttgtgctaatattytcagctttccgtgaattccagtagtgtttcctatagtacttcaaacaaaggtgaaaaatcctaaaggtacaataagtgctaactctttttaaataagttttcccattgcctacatatttacagtaattattacattagttgctttttttttttttttgagacagagtcttgctgtgtcgcccaggctggagtgcagtggtgtgatctcagctcgctgcaacctctgcctcctaggttcaagtgattctcctccctcagcctcccaagtagctgggattgcaggcatgtgctaccacgcccagctaatttttgtatatttttagtagagacggggttttgccatgttgaccagggtggtctcgaactcctgacctcaaatgatccacctgcctcagcctcccaaagtgttgggattacaggcatgagccccttcgtccagcctagttacttttaaatagtacagaatttgcacagtaatactgattgcatcttgagtttgaacagtgtgtttcttccttggaagtcatagaaaagcataacccttctcaccttctttcatattttaaaaatcatggatttgaaacatgaaaaggaaaatgtgggggaccatggagattattctttaaagaactactgcttgggttagtgaggcctgtgcctgcctcacagcccgagtgctctgcagcgtccccagctcctgttcctacagctcttctttataatgggcttcatgtaaagtaactctgagtgtccgtcacaaaagaaacgtctgtgactttcttaagcactcatactctgaattgggttaggtgggagctttggaggggcgatgcctttagttaagcttctttgaaaataaataatgagtttgccttcacctaggaaataaataccaagaattgaacaaaaaccaacatgatgtttttacaaaataacatctaactagaacaaaatcatgtctatgataaactggctctagaacctagaggacagttgatagaatttaattccacaaatatggttttcatctgcattcatttcatcagctctggagggaactgttggcccaggtgactttcctgaagcaagaggccccaagagcaggaaggactaggcatactcagtgcacagcagggaaacccagggagggaccagggaccatgggggccgcaaaggtggtgatggggaagcctagggggatgggggatggggcagcaggaggggctgggagagacaggacagcctggggaggttcctgtgacccccaagcccactctgcccttgccccccaagcaggcctggggaatgccatgccctccccgagaaagagagctcctaggccaagtcctcatggggaacctctgtagggtgcagcattgtgcactttggcaagttggaggctctgagagagacttctgatctcatgagcccacaactcatgttccacgaaaatgctttgggaaaagctagtctgaactggccagaggtgtctgtctccccagagattytggcagctgccggcgaggacctcacacacagcgccacatcayagcagccattcctgggtgygggtcttcttttacccttgctagtgactcagatggatagcctgtgagtgctctcgttaaagtcagattgaaccttaattgagcaccaagaaggtgcatgacattccgagagagagctctgggcaggaggagcacaggcaggtccctcggggagccgtgtccagacctgcaggaacgggaggctctgtgggtttatcagagagggtcttgagaacttctgcttccagccgtgataaacagatttatcttccaagcctaattaaatgcaaaacacaagaaaacaygtgaaacaaatgttttcagacattggataagaagctggggacagggatgcctcagagaagagaaacaactctcccacatctagaaygaacagccagacggcctcaaaacctctgtttcaacagccacatggcctcgaaacctctgtgtttcaacagccagagggcctcgaaacctctgtgtttcaagagtccttgtacctgctgtgaagtttgtcagagtaaacttcagtgtgtgcaaatctcagaggagggccaggctctggtgggttctagggccccccaacctgtgcccagattggcacagacttcctaagcatgaacatcgtgatgcatggagaataaactgacatgatggacttcataaaaattaagtttttgctcttctaaacatagtactaatcaagtaaaaaggcagacaagagtaaaatactttcmgtacatatcttcaactcaacgatcagacagacaactcagttttgtttttaagatgaaagatttgaacattcatcacaaaagaagacataagaatggtcagtaagcacaagaaaatgtatttaacatcattagttaccaggaaagataaatttaagccacagagagagttaaggctctgctaccacggaggccaggccgaaaggccaagtggcgttttggcaggcgggcagcagggtggcactgctggcgagagtgcagatggtccagccactccagaaagcaggctggcagtttttatgaaattaaaaatttgctgccccatgccccagcaacctccctcctcagtgttcacccaggaaaaaggaaaacactcatgcttccacrcaaaccgayacagggactctcaccgcttcagctgtgatctccacagactgggagcttccacgcagaccagcagcaggactctcaccgcttcagctgtgatctccacagactgggaaaacaccaacggccatccaccagggggtggaagagctgcaytgtgtccatagtgtgagacgctggcctgcagcacagagaaagcagaggacacgctcggcaaggtgggcgagtcctgacaccgctggcccgaagagacccactcgcagagagcggagaccacccagagagaatagccaggtgttagcctgcggggaacagccatttatgtgagactcaacggcagcgagggaggcaggggtctcccacctggcgcatcacaggcctcgtccttgggggtgacggagatgctccgtgtcatggtcacacggcggttccatgacacttgtcaaaattcatcacatgctgaaagttatacctcaagaaagtaggtttatgaaaaggaggcagcaatggggtttttgttgttaaaggttgaagagatagggaggggttgttcaaagaaagttaacaaaagtaattaaagatttcgagggaagtacaacagtgttgtacaagtttaacgtaataaagaaattaaagattgaatttctggatagagttctctaagcatgtagatatttagtgcccagcagtaactcatcaagaaaacagaatgatgtgaaatagactaaaagtaccttagaagaaaatgtttcatatagaacctacaatagttttaaaaatagaacggtctgcatttagtgaccgtggaatctcagtcatattaaaacagaatataacctttaggtatccgcatgtttcaaggctaaaatataacgtggtgtcatgggtgtttctggttctctgccacggggtaactttcccaacttgagataactatgagagtgtgttctcataggtgacaatgtcatttaacaacaacaaaaaaaaccccagccaagtgcagtggctcatgcctgtaatcccagcactttgggaggccgagttgggaagatttcttgagactaggagtgtgagaccagcctgggaaacatggtgagaccctatctctacaggagaacattagctgggcatggtggtacacacccgcggtcctagctactcaggaggctkaggtgagaggatcagctgagcccaggaggtcaaggctscagtgagtcatgattgcmccmttgtactccagcctgggccmcaragtgagaccgtgtctcaaaaaaaaaaaaaaaaaaaaaaaaaaacccagccccacttccggcccagctccacttccaggacggkgggaggtgaggtaratgggttcctccctgctccttctgctaagttcagctggaaacaraaggctctgagtggaragcgaggtgaacaragggggcaaggggcgaggcggcaggagctccccgggttttccagcagctggagctgaaggagccggcagcctggaaacgcccatgggtgcaraaatttaaaatttgaaagtcccagcgaggtcccagcctctccaaccgtgggtccacgaaaggggcaccaggaagacagatggctttcagatgatcgtcactctactccagccagacgccagggaagggctgtgcccacctccccctccccaaaaaggcaagtggagagctgaaagtgccacttcacgagatgcagcgatgcacccggcatctgcagggtgatggaatgggaggaggcaggactgcatccccagtgaaggggtaatgagcccctcagtgtcggcagaggccgcatggggagccttaacccctgcccctgcacagcagcaaaaacagcgccctcctttccccaccagagcagggtcagcacccttcagaaaattcagtctttacccggaatgtcaggggtttccatcagagtcccttgccataccaagaaccaggaagatttcaaggtgaatggaaaaaagacagtcaatagaagccagccctgagatggcagagatgctagaattctctgacaaagactgggaaacagtcattaccaacatactggragcaaatggcaaaatagaacagcccagcagacaagatacagagcagaaccaaatggaaatcttagagatgagaaataacccagacaaaaaaaaatgccgtgactgggctcagcagcaaaatagaagggacagagggaggacrcagtgaactggaagacagaaaaacagaaagtcctcaatctgaacaagagagaaaactgactgaaaaaaaatggatcagagcctcagggacagcaagatggtaattctaccgtttgtgccgtgggagccccggccgctgtaccgtttgtgccgtgggagttccaggggagaagagacagggcagggctaggaacttacttgaaggaataaaggtgaaaacctcccagatttggcaaaagacataaatgtatagattcaagaaggtaagcaaaccctgaacaggacagtcaaattcacaccaagataatcataatcaaactgatgaaaaccagagacaaacccattgaaagcagccagtgaggagacggggtacgttggggatgactggaaaccctgcaggcagagggactcaagtgccggagaaaggcctcatgggcrcggcacactgcagccagtgacggccgcttccggaaaggaaagggggtgttggcaagactcgtgtccagcagtgcttaaagattctccaagctcagccatgaaggggcagtccagttaggaaaaggacagaaggcgcagagacggccaccctgtgtgtgaggggacgcacagaccacaagcaagccggtgaaatgatgmgcgcatcgtcagccacagagaccaggttagaccacaggatgctccgcctcacgcctgccagaattgtgaggaagagtcacagaaactggatagctcttacattgctgtaggagtgtaaatcctaccatctggaagatgtcctagcactcatgctcctgagcgtttataccctctcactcggcactcgtttccaaacctagcactcacgctcctgggcgtttataccatctcactcggcactcctgtccaaaataaatggaaacttcaccaaaaaacctgtgcagtgaatatttacagcagttttatttgtgatcaaaaactaggaccaacccagatgtaacttcagtggttaagcacactgtggttcatttgcctgccacaaaatagtagtcagcaatagaaagaaataagctactgacacagcagcaacctagatgaatctccagagaattgcgctgtgtaaaagacgccagtccccgaagttaacctgctgtacagttccatttgcatagcattccatttgcatagcattcttgaaatgaccagattagagatggggaacggattcatggtggccagggattagggaggaggcagcagagggaagtggttgcagctgcagagcagccgcaggagggaccctgtgtgagggrtgctctgggtctggaggtgtctgtgtgagggatgctctgggtctggaggtgtcygtgtgagggaccctgtgtgagggrtgcyctgggtctggaggtgtctgtgtgaggggtgtcctgggtctggaggtgtccgtgtgagggaccctgtgtgagggrtgctctgggtctggaggtgtctgtgtgaggggtgccctgggtctggaggtgtcygtgtgagggaccctgtgtgaggggtgctctgggtctggaggtgtctgtgtgaggggtgtcctgggtctggaggtgtccgtgtgagggaccctgtgtgagggatgctctgggtctggaggtgtctgtgtgagggaccctgtgtgaggggtgctctgggtctggaggtgtctgtgtgaggggtgccctgggtctggaggtgtccgtgtgagggaccctgtgtgaggggtgctctgggtctggaggtgtctgtgtgaggggtgtcctgggtctggaggtgtccgtgtgagggacccctgtgtgaggggtgctctgggtctggaggtgtctgtgtgaggggtgccctgggtctggaggtgtccgtgtgagggaccctgtgtgaggggtgtcctgggtctggaggtgtctgtgtgagggaccctgtgtgagggatgctctgggtctggaggtgtctgtgtgaggggtgccctgggtctggaggtgtccgtgtgagggaccctgtgtgaggggtgccctgggtctggaggtgtctgtgtgaggggtgtcctgggtctggaggtgtccgtgtgagggaccctgtgtgagggatgctctgggtctggaggtgtctgtctgaggggtgccctgggtctggaggtgtctgtgtgagggaccctgtgtgaggggtgctctgggtctggaggtgtccgtgtgagggaccctgtgtgaggggtgcyctgggtctggaggtgtctgtgtgaggggtgtcctgggtctggaggtgtccgtgtgagggaccctgtgtgagggatgctctgggtctggaggtgtctgtgtgaggggtgccctgggtctggaggtgtctgtgtgagggaccctgtgtgaggggtgctctgggtctggaggtgtctgtgtgaggggtgtcctgggtctggaggtgtccgtgtgagggaccctgtgtgagggatgctctgggtctggaggtgtctgtgtgagggaccctgtgtgaggggtgctctgggtctggaggtgtctgtgtgaggggtgccctgggtctggaggtgtccgtgtgagggaccctgtgtgaggggtgctctgggtctggaggtgtctgtgtgaggggtgtcctgggtctggaggtgtccgtgtgagggaccctgtgtgaggggtgctctgggtctggaggtgtctgtgtgaggggtgccctgggtctggaggtgtccgtgtgagggaccctgtgtgaggggtgccctgggtctggaggtgtctgtgtgagggaccctgtgtgagggatgctctgggtctggaggtgtctgtgtgaggggtgccctgggtctggaggtgtccgtgtgagggaccctgtgtgaggggtgctctgggtctggaggtgtctgtgtgaggggtgtcctgggtctggaggtgtccgtgtgagggaccctgtgtgagggatgctctgggtctggaggtgtccgtgtgagggaccctgtgtgagggatgctctgggtctggaggtgtctgtgtgaggggtgccctgggtctggaggtgtccgtgtgagggaccctgtgtgaggggtgccctgggtctggaggtgtctgtgtgaggggtgycctgggtctggaggtgtccgtgtgagggaccctatgtgagggrtgctctgggtctggagrtgtctgtgtgaggggtgccctgggtctggaggtgtccgtgtgagggaccctgtgtgaggggtgctctgggtctggaggtgtctgtgtgaggggtgccctgggtctggaggtgtcygtgtgagggaccctgtgtgaggggtgccctgggtctggaggtgtctgtgtgaggggtgccctgggtctggaggtgtccgtgtgagggaccctgtgtgaggggtgccctgggtctggaggtgtctgtgtgaggggtgcctgggtctggaggtgtccgtgtgagggaccctgtgtgaggggtgctctgggtctggagatgtctgtgtgaggggtgtcctgggtctggaggtgtccgtgtgagggaccctgtgtgagggatgctctgggtctggaggtgtctgtgtgagggaccctgtgtgagggatgctctgggtctggaggtgtctgtgtgaggggtgccctgggtctggaggtgtccgtgtgagggaccctgtgtgaggggtgctctgggtctggaggtgtctgtgtgaggggtgccctgggtctggaggtgtccgtgtgagggaccctgtgtgagggatgctctgggtctggaggtgtctgtgtgaggggtgccctgggtctggaggtgtccgtgtgagggaccctgtgtgaggggtgccctgggtctggaggtgtctgtgtgagggaccctgtgtgaggggtgctctgggtctggaggtgtctgtgtgaggggtgtcctgggtctggaggtgtccgtgtgagggaccctgtgtgagggatgctctgggtctggaggtgtctgtgtgagggaccctgtgtgaggggtgctctgggtctggaggtgtctgtgtgaggggtgccctgggtctggaggtgtccgtgtgagggaccctgtgtgaggggtgctctgggtctggaggtgtctgtgtgaggggtgccctgggtctggaggtgtccgtgtgagggaccctgtgtgagggatgctctgggtctggaggtgtctgtgtgaggggtgtcctgggtctggaggtgtccgtgtgagggaccctgtgtgaggggtgctctgggtctggaggtgtctgtgtgaggggtgccctgggtctggaggtgtcygtgtgagggactctgtgtgaggggtgctgtgggtctggaggtgtctgtgtgagggaccctgtgtgaggggtgctctgggtctggaggtgtccgtgtggatgctggtggtgaggttcacactacagttatctaagatgttaccattgggagaactgggtaaagatcacataagatctcggtgctattcctgacaactgcatgtgagtctacaatgatctcaacatagaaaggtaaacatttttaaaaatcattcttctacccgtaagcatttgtgacttatagaacatgctactgtgctctgagataaatactcagtctccgcaatcatcttacttggttgccaacttactttgttggtttttgtggagtattttttggtgtttttgaagctgtgacctctaatccagaggtctgtttctagctgtgtggtagaagtttctcacgcccattgcactccgctcttggtcttgcaggtatgccaccatatacaccatgttcccagtgttctccttagtgctggaccaggacgtgaagccagagatggcgatgctctacccggagctgtacaaggacctcaccaaggtacgggcctcaggcaagctgtctgcctcacgactagcacccacatctagcattttacacgagtgagaaacaggccagtcaggaggcatttccaggcattttgtgaaaaacgattctctgtccttgaagatgttttttatgtctcctaattgttgttggcattttctctttgagttaaacttcaaaaggggaaaaacatctcagggaaaaaaatttctcaaatgtttgcaataaagctctaatatcatacatacaattagaattrtaaaagatrttctaaccatttgtggaacttttgtgaagtgagctcaccaaatgtcagagaagatctcactgtgtaatttctgtagaaaggctcccccggacagcgtcactgcacctgctgcagaaatagcattccaaagctggggaacccatgggctgcatgtttcctgtgtatttccaagtttgtcagtagttgtggatttcagaattatccctgaaaagtgataacatgtgtctgtccctagggtccatagactatttttgcagtgatgtcaccaagaaaaaaatccaccccagaaaacttcagtcacctgaaactctgagaaagatggatttatttggcttaaaactgtgctctgttaggattaaaggaggctttgaatttatcatattctttacgacagcatattttatagcatagaacgtgtaaggatacggggtagaagagaggctcagctctgcagacacaaatcatggtaactctggtattttccacaaagctagctgttttgaatcaacattgaaaacaaaatccactaaccgcaattaaatttagatttacaatcrataaatgacaggtgtctgaaattatcaactcagatttttaaagcagtagctgtatggtaaagaaagaattagattaggcattaaaaaagaaagctaatgactacctagcaaacagattctagtccagctaaccactaattaaccaactagattcttacctagctaaccacaaactgagaaactagactcctgtctgtctaactagtaactaacaaacgatactctatctaatacagctaaccactaacaagctagactcttatccagctaaccactgacaaactagactctagtccagctataaccactcattagccagagaggtgctgggtaagtcatgttaactttttgatttcttgatgttattgaaatgaaataaagactttaaagtttcttgaaaaaaataaagaattctcattagtgttataatcaagacaaataaagctagttcaccagtatcacatgaaatataaataccaagcgttattatcatggtggcatcatcgtgactactgggaarcatcgtcccaggtcacacctactataactagaagcaagacygcttaagtatcttaaactgatgaaaccattgtgataaagtacagcagagtaaggagcaaagatccaaaaacttcgggaagctagtgtgaataatgatcattttagtagcatatgcatttcctcattcccagagactctaaaaatgtttacctaaatgctgccttacaaacatacgggaacaagcttttcatgtacgaaggtaaacctcgatgcgctaccctcaaccctaggaaaccggcacgcaagcagggcagaggtcaccaggggtcttgtagccccagccggtgctcccggatcgctgtgctgggagaaacttgtcataggactgtcatgccacagccatcttgaccggctattggagtggggcagtaacacgtttttactgttttcaaggatttagattgtacgcaccagtctctttctttgtggatatctaaatggctctagtaacaagaggttcatagggccacaggtgtctgacggagcagctaattatccgtaactgtggccatggaatccgtaagttctgtgttactggtgccrttgaaccctgttcacttctgattgtgttggatctcattaagggtattaaatttccgttttcgttaaggtgagcaacaatttaraatgttttagtatcctaaagtcaggtcaccatccctacattttttttttttttggtcaaraatgcagtcactcattttctctaagcttcttttcttcaacatcttatctgcattgtaacttttttttaaatctactacacttcaaattctttgaaaagaaaatagcactaaagtactgagccactaaagttaatttagttattttttcttattgaagctaaakaactattttgaagctttctgttccttctgaacagttcgccaaggtagcgcaractgcagcactctgcgttgttgtctgatgatcggggcagctggagactggatgtgccaaygcagtttatccacaccggtcagtgtcagtggacaccaagtccccagtccgtcggctcaagctcctgcgatgtaggacaacatagccctgctctcaacragtctgtattctagtcaggatgagaaagcagtgaatcagtggcatagagcaacagcataaagggccgcggcctgcagtgtgagtaacaacagcataaagggccgcggactgaaatgtgagtggctgaccggcgagtgccggtccagtcagttytgagtcacatatctcaggtcaccgtaaatttataaaataccttcasaggcgagccagggaggcaaggcatgcattccctgcacacaggagaagactcaattggaaagaaaatctcctcttttttatgtgtatttgataaccagtctttataatctaaaagtacaaataaggcacgcattataaatctcacttattgtcctaatgagttagccaacctcaagtataaacatttgtcccctgctgtgtctcgatggcctgagccacacrtcgacacagtatctgttaagtaagtatttgataaacaaatgaggcagtgaatgaatcagttaaaccaagagtcaggatttccttcgctttcctaaaactrtgtagcttttattctttacagaaaatggtatatttgcaacactattttgttattcttttgaagctcaaattctgctttgaattattaaactttactcacgatgagttcaggcacttaattttctggatgccagtaagacgggaaactgacctactcatctctctcctaactctgcacatgtcttcattcattctgaatggtgtgtaaccgcttagggaagctagttactccaagatccaggcatcaggactagtaaggtgaccctggttaagtgagccagctcacgtggtcccaaaatatctcagactgtggctgtgaattttgttaccaattcataatcttacattaccagctaactccagagacatttgatttgtagttgtgctaattgtaaagatatcaagtaggtaatatacagttcttcatgaaatctctggtgccattaggtattgaaccattcggaccccttcactaatttttattttctgtagaatactctcaaatggttttatcttttgaaatgtatatttgtatacttatattcttttcaaaataatagtgaataagacaataaaaggaaatttaaaacattgagattaggaaggaggaaataaaaatatctctgtttgtggatgctataattttctatgtagaaaattccaaggaatccacacacatacaacctcctatacttgtaaacttcataaagtttcaggatacaaggaataatttttcaaaatcatttttgattctgtacactagcaatgaataattggggtttgaaaaaatttgtaaacatttataataatacatttaagcatttataatacaagaaagtgagacactgaagtgtacctctaacaaaatacacccaagatctgtgtgctggaaaccaacaacattgaggaaagaaactgtaaaaggcgtaaacagatgttcctggattgagagacgtaaacagatgttcctggatggaggcataaacagatgttcctggaatgggaggcataaacagatgttcctggatcaagaggcataaacagatgttcctggattgagagacgtaaacagatgttcatggattgagaggcataaacagatgttcatggattgagaggcgtaaactgatgttcctggattgagaggcgtaaacccatattcctggattgagaggcgtaagcagatgttcatggtttgagagacgtaaactgatgttcctggattgagagacataaacagatgttcctggattcggaggcataaacagatgttcatggattgagaggcataaacccatattcctggattgagaggcgtaagcagatgttcatggtttgagagacgtaaacagatattcctggattgggaggcgtaaacagatgatcctggaatgagaggcgtaaacagatgttcctgggttgggaggcgtaaacagatgttcctggattgagcctcaattagatgttcatggattgagagcctcagtrttgcttcacattgacaagctcactctagaatttatatggcaaggcaagggaactygaattgccaaaataatttagaaaataacagagttgggccgggcgcggtggctcacgcctgtaatcccagcactttgggaggccgagacgggcggatcacgaggtcaggagatcgagaccatcctggctaacacggtgaaacaccgtctctactaaaaatacaaaaattagctgtgcatggtggcgcgcacctgtagtcccagctacacgggaggctgaggcaggagaatggcgtgaacccgggaggcggagcttgcagtgagtcgagatcgcgccactgcactccagcctgggcgacagagcgaaactccgtctcaaaaaaaaaaaaaaagaaaagaaaaaaaagaaaataacagagttggaaaacacactacctgattccaagacttactgtaaaacagtaatcagttagacaatgtgttattgtcaaaaggatagacaaaaagatcggtggaacagaaaagagagcccagaaatacatcacatgtgtcagatgatctttggcaaacatgagaggaaatcagaaggagaagagttgtgtctgcagctgttgggacaattcgccgcccatgagcaacagacccacaacctccacctcacacttcatgtgaaaatccacccaaagtggacccttgacctatatgtaaagctataaacctttcagaagaaaatacacacaaaatatgcatgaccttgggttaagcaaagagtttttaatcatgagatcaaaatcatgatccttaaaggaaaaaaataataaattagactttaccataatttaaaagttttggccaggtgcagtggcttatcatgcctgtaataccatcactttgggaggctgaagcaggaggataacttgagcccagaagctcaataccagtctgggcaatatagtgagaccgtgtctctacaaaacatagaaaaaaatgagctgagcatggtggttgctgtgtgcctgtagtcccagctgctcagggggctaaggtggaaggattgcttgagctgaggagttggaggctgcagtgagctgtgattgagccactgcactccagcctgggtgacagagcgagaccttgtctcaaaaaaaaaaagtttttctctctgaatgatactgttaatgaaaaaacaagccacagcctagaaggaaatatttgcatgtcacacttttgataaaggagttgtttctatagtatataagaaacccccaaaattcaacaagagaacaacccagtttttaaagtagacagaagatattaacagacaccaccccagagataatccacagatggcaaggaagcctgtgaagatgctcagtgccattttcatcagggaactgcaagttgaagccaccgtgagatgccgtgtacccacccgtgctagaacagccgaaataccagcaacgtgaaaggctggggagggtccagagcagcagagactccccttcactgctagggtgaagggagaatgatacagcctcttcggaagacagtttgggcatttcttacaaaggtaaacatgtatttaccccatgacccagtagtcctgttcctaggtatttctccaagagaaatgaaaacttagattcatactaaatcctrtatatgaatgttcacagcagcactgtcataactgccagaagctggaaacaaccttgtgcccttcagccagtgggcagaaggatgtctccgtggacagggacagcccatgcgtggatggaaggacatctccgtggacggggacagctcccgygtgatggaaggacatctctgtggacggggacagcccatgcgtgatggaaggacatctccgtggacagggacagtccatgcgtggatggaggacaactccgtggacggggacagcccgtgtgtgatggaaggacatctccgtggacggggacagcttgtgcgtggatggaaggacatctccgtggacggggacagcctgtgtgtgatggaaggacatctccgtggacagggacagcctgtgtgtgatggaaggacatcctagtggacatggccagcctgtgtgtcatgccaccaggcagtgggattgtgcttagcagtgaggggttactgctgactcacatgacatgatggatcatacattgtgcattttgctgtgcagcagaagccagacttgaaagctggtattgattctttttaccggacacctgggaggtgcagaactgtagggaagagacccgtccgtggtcgctaaaggtttgagtgtagagggtgaccggagaggcatcccgagggggtgtgggtgtggaagctgctctgtctggcgcggtggtggcggacacctgaccgtgcctctctcagagcccgctggacggcaccagcatggagctaagggaggaggaatgcagacagcggcccatgaaccgcagaascacactgtgggctgggaagaaaggagctcttttcagtggccttgggaaaggcgtttgactgtggttcactgtaaggctgaagacaaaaagaactgcaaaccgtgggctgcgtttggcatttgcttcttacaggaatcaataagcccatgcatggtagctaatgagaagcagatttctccctgttagcgatgaagttagaaatgaagggctggattgaagcccagatcagtttgggcttgtggtttctgtgagataaataaatagatgaagaaataaacacggacatgtgtgagcatgacttagtaaacacacacagtcctaggccatacaccragtggctagaatcaggaaccaggcggtagtgagcaagctcagtgttgcagattatgcggacgagaccctgtgccgtcccccaccacgcagagccctagagaaggggttaattccagggctgaggcaagggaaatacaagatgagcctgaaacttcttgtggagcaaaaaagtaaggaactgctgaacaagaatcagtgaggctggtgcgggaggcaggtctgacggcgtcagaggctgagcctcccacgggctagcactgaacaccctgcacagcaacctagacagcagcatgactagatgataaccagagagcacacagataccttcacctccaccgtgtgtacgcagagaaagtgcctcctcaaccagagagcacacatatcttcacctccaccgtgtgtacgcagagaaagcgcctcctcaaccagagagcacacagataccttcacctccaccgtgtgtatgcagagaaagtgcctcctcaaccagagagcacacatatcttcacctccaccgtgtgtacgcagagaaagtgcctcctcaaccagagagcacacatatcttcacctccaccgtgtgtacgcagagaaagygcctcctcaaccagagagcacacatatcttcacctgcactgtgtgtacgcagagaaagtgcctcctcaaccagagagcacacatatcttcacctccaccgtgtgtacgcagagaaagtgcctcctcaaccagagagcacacatatcttcacctscacygtgtgtacgcagagaaagtgcctcctcaaccagagagcacacagatatcttcacctccaccatgtgtacgcagagaaagcgcctcctcaaccagaggattccagttataaatggtgaaggaaccagggcagttggaggccccgctggggcaccaaggcagcagccactgtcacgaggtcttccaagggaagtggaactccagggtcacagttcccatcaccagggatgagagaggccaccacacctcctgctgtggagccctgcaggggacacgtgtctcctcaacaaatcctccccagtagtgtcatcagtagaagacatcagacaagtcgaaatcaagggcattccaaaargacatgtccggagctttgaggagcagccaggtcattaaggacggggagacagaggcgctggccagatcacagagcccaggagacatcacggccagagcagcgtggggtcctgtgtggggccctgggcaggaaaagcacatttgagaaaaaccaggacctccacaccatttctctgccacggtgcgtgtctgtgtctccatggagtgtcgccctgggtgggctggagggcgccatggccccgggtgagctggacggcgccgtggccccgggtgagctggagggcgccatggggctgtctgcrctgcttctgcagcttccctgcaagtctaaagtgatttcaaggcaaaatgattagaaaacggagtcagagccaagaaagtcttcaattttcctaggatagatgaacagaattgggcatggcgccaggtgcctgtggtcccagctgcccgggctggagaatcacttgagcctggaaggtcraggctgcggtgagctgtgatcgcaccactgcaccccatccctcggcaacagatyaggaccctgtctctacaaaaacaggactgtgtttgcaaagctgcagtcttatccttcaaagtgtggagttcaaaaccagcccatgtctgcgcctggccctggcccagttgcgagcactctgtggcagcaagtccacctttaggtgcacactctctgcttggtggctctcatttaacctgtcctgtaatatttgaactttctgtccagtaatatttgaagttcattttatattctaagagatgtatttaatgaaattgagcttatccatgtaagaatgaaggaatgagaccctgaagaaatcagtcaccgtaatttcagaccattaatagaagaaataaaagtgacagtggagtgagtgtggcaagcagaagagctgtcgggaacgtcacctgcccacccctttgctgtaggaccctaccaccagcatactccgtcgttggcaccctcgtcgttggcacgtctctaccctcagcagagcaggccaggcactgaacggcaggaagcccacacttcctccccagcttcccttcctgccaaggccagagacgcgtgcagagccccagttaattggggcttctctccccggcgccaccgtgagcaccgtccttccctctctgtttggagggtttgttcttgatatgctttgactgcactttttctcctcttgcatctgcctataggatctttctactccacactcccaaacttctctcaaataattacaattatgggaacaggcgaaatttgttgttgttgttgttctagtaagaatcagattgggaggccgaggcgggcgggtcacgaggtcaggagatcgagaccatcctggccaacacsgtaaaaccccgtctctactaaaaatacaaaaaaaatgagccgggcgtggtggctcacgcctgtaatcccagcactttgggaggccgaggcgggcgggtcacgagtcaggagatcgagaccagcctggctcacacggtgaaaccccgtctctactaaaatacaaaaaaattagctgggtgtggtggcgggcgcctgtagtcccagctactcrgkaggctgaggtaggagaatggcgtgaacccgggaggcgaagcctgcagtgagccaaggtcgcaccactgcactccagcctgggcgacagagcaagagtccgtctcaaaaaaaaaaaaaaaaaaaaaatcagagaamgtatactgaggaggtaggctgggagaataaattataatagagataaaagtggttacagactcaggacaggagtcctggcattttggagtggctggtcccatgccacggtgccgatccttgcagagggaccatctttcacgccacacgcgcatcagcgtgctctgtgccccacagcactgagtgcttccgtacgaataactgtacacatatgactttgaggttggttaatctttccttaaaatttgcttgatttggccgggcgcagtggctcacgcttgtaatcccagcactttgggaggccgaagcagacagatcacctgaggtcaggagttcaagaccatcctggccaacatggcaaaagcccatctctactaaaagtacaaaaattagccgggtgtggtggtgcacacttgtaatcccagctactcgggaggctgaggcaggagaatcgcttgaacctgggaggcggaggttgcagtgagctgagatcgtgccactgcactctagcctgggcaacagagcaasactccatctcaaaaaaatgaaaataaattttraaaatttgcttgattttattttttacaatttttggtatgatagaaatatactttctgaatccgtaatatttaatggtaaatataacagtagcattcagtgaatatttactatgctgctggcattgtgcatattttatttcatggctcattttatttcatgcacgtgagccacatgccactattacttctatttcacagaggagggaactgaggcacagagattaagtcctgagcccaagaacgcagaagaaaggcgtgtgctaggcaggactccactccaggcattccacacatacggggacatcagtcagagtgacagacatcttcatctcttcctaaaccaaatgaagaggtacctggcccaggaagagtggcttcttccataacatgaaacccatagtgaatgaattgcttctatgagtaacgtgtctgtaccatcaaatataacaggattttgttctcagagctacagtctgggagccattaataggaggtgtacggatatttttctcaaattatctattttgttgatgttttttgtacccattctgttgtgtttgcttttattaatctataatatcatctgcttcaatatggaacaccccacaggtgcaggtctgaggtgctccctgttggcagctcytaaagagaggcagcacagacaccacttcgtcttccacatagacaccaatcattgacctacatgaataaaactgaatacatttcagcaaatcaggccacagaataagccttttytttcttatgtcaaaataattaaatttccttttacagtttttgaataaaatgagccacatacttaattacagatgaatttcgtgaccaaagaccaaacacctaccattacccagggagagaaatgtccttgggaaatacgtaccaagagaacttatttggagtatataaatggtttaacttcaaagttttytgctttttaaaaatcagtggtgcttggctgggtgcggtggctcacacctgtaatcccagcactttgggaggccgaggtgggcggatcatgaggtcaagagatcaagaccatcctggccaacatggtgaaaccccctctctactgaaaatgcaaaaattatctgggcatggtggcaggsgcctatagtcccagctacttgggaggctgaggcaggagaattgcttgaacctgggaggcaraagttgcaatgagccaagatcgtgccattgcactccagcctggtgaaaragcaagactccgtcttaaaaaaaaaaaaaaaaaaaaaaaaaaacagtagtgcttcttcgtcacagtgaatttgaatcttccttttcatattcacgtgtgagggctcaagctccgtcagcatcttcacacactgactcttgcarcctaggaaaacacttaacatatgtcaccacacttgtcttttataattaaactacaactagaattataattcataaatctgccactggtggcctcctgcaggaatatagccgcatttccagcgtccgtgcctctgttctgtgatggctcatgcctgtgtctaaaggtcttcagcagactcaggcaggtgcaggttcagacaggccctgagcacagcctgtcaccatcctccatcttccctgctgtcttctgtgtcccctgagcttccgtgagggtttgtctttcctctgtggctctttaaaccacttcctgtccttaggagaatctcccccgtgggtggggaagccctaaatcagggcaggactttgggctctgatcagcagactacacttcttagcaccaccagcctccagcaagaacctgaggaaatcacggaacttctcgagtctcctcgtctgtaaatggaaacgacgtctgctctgtgtaactgagaaaatagatgcgaakgtgtcaaacraaggcctcacataaagacagggcctctcaacacgygtcactttcgacagctctttagcaccaacaagtcagggcgattgttaatgactcagcctctcttcttggactctaaattaatcttcagggatgcagtgggacaagcaaccccgtgggccagagctcccctgcctcctgccccctcgtcccctgcctcctgccccctcgtcccctgcctcctgccccctcgtcccctgcctcctgccccctcgtcacctgccttcaacttcgcagagtgaagggcctggcgcaaggacccattccatggggttatgtatgtgacatgttctccagcgagggtttaagggataactttttacttcagttgagatgtgccatccttactgaagaactgttacgttctgtatcttttgatctgaaaaaaccaaacagtaaatatagaagtatttgttgacaagaaataagggaaaatgtttttattgccaagagcctttccccctggttcactgaaatgtttgcttgtatacatcactcctggcttagtagagccaacaagacggcaggtcaaacagaagacaacatgaacgtctaacctcaggcaccagyggacacgtgtgggacccaggcagcttcttcaggattcgggtgtcaggaaaaggcgcccgaaatgctggtagaccaggtggctggggtggcatggatggggcttatggacctgggtctttcagaagtgacccatagcncactcctggaaggcgtgagtcaagcaggtggttctgcncactaacgacgctcttccactgtttccctagggaagatccttgtccttcaaaaccttcctcatctgggttttaataagtatttaccaaggtaagacgagatccttagtttactggactaaagatttttttattttggtctttttgttagcaatattgtttttacttgcagattaaattccmacagcttaaaatgccatcagcagttaaatactcccttctgtttatcttgtaaatcaatattccagcaacatgggtcctttttttttttttaactgatgcatgccacctaaaaactgacttagtttttaattaaatgttaatccagaaagattttaacaagcacttaccacattrtataccctgcacaatggctttctttcatagagtgataaaaagactttgagaaatctgagttatgtaaggagaagccattagctgcccttkgtttagtgttcagataaatgggagattgttgcaagtataactaacagatcagatatattaattacatgcaacacataattatttacactaattgaagtagaggtgtggcttcgtatccagagattaaaaagtttgtctgcctcgatttgccatttctaactgatgtagctaggatcccatcttattttgtccataatccagagtttaagtgacttgttcatcagcatgaagcatgggcatggccatwatccgcctttttttttttttttttagacagagtctcgctctgtcacccaggctggagtgcagtggtgtggtctcagttcactgcaacctccgtctcctgggttcaaatgattcttctgcctcagcctccccagtagctgggattacaggtgcgtgccaccacgcctggctaattttttgtatctttagtagagatggggtttcagcatgttggccaggctggtctggaactcacgacctggtgatccacccgcctcagcctcccaaagtgctgggaagacagacatgagctgctgcgcctggcctatcccctatttttaagggtcttgagtgacgttgctggttcaaggctgtttcctctagctggcttacaccctgctcgtgtgcatggaaaaagctcctgctgtttttcaggcggcatcctcatgtatggggccctggtgctcttcgagtctgagttcgtccacgtggtggccatctccttcaccgcactgatcctgaccgagctgctgatggtggcgctgaccgtccgcacgtggcactggctgatggtggtggccgagttcctcagcttaggctgctacgtgtcctcactcgcttttctcaatgaatattttggtaagttgccttggaattgttttttgaatcgttctctattcatgattttgaagtattttcttattgttgcttctgaatacattgtgttaagttgtggatcatggtaaaacccatatcagaaagtgcctgctcttactgtccctgcaccacrgatgaaggcgctgagccccgtcrgtcactggctggccggtcccctgacaggaggcgctgagccccgtcggtcactggctggccggtcccctgacaggaggcgctgagccccgtcggtcactggctggccggtcccctgacaggaggcgctgagccccgtcggtcactggctggccggtcccctgacaggaggcgctgagccccgtcggtcactggctggctggtcccctgacatgagcagcacagccactcgggagcagttgggactcagacctgcgggaggtgaacacagccgcgtgtgcacttgtcctcgtctcagtgcctgagtgtccatgcagtggtgaacctgtacgtaggaaaatgtgaaatgttcctgttcwtacataaaagaactctcagaaaatacccgtggctcataagaaatggttattttcaagttataatgtgctagttatttttcttttgaaaattggctcttagaatattttcctgtaagatcatgaattaacacactcaaggacacgtgaacacactcagtgccacagtgagctcacaaaacgacaaagacatgcatcacgggcgtgggcaggactcaccacgactttgagcctcagcttttgcatctgcaaactggagrcggtatcacttcccattaggggcgggtctgaagatcagtagtaacacgcttacatacatgtgaatgaatgtgcagagctcctttcacacctgcagaacatggccagccctccagcgcgtgcgccttctgtgctgagctcctctcagacctggataggtctctgtctcctaggggaatgccaaggtgtgtgcttctcagacacaggagcctttagctattgggtttcagtgatgtttaaacagttgtatggtatcaggcagggaaatgagatgttaaaaccacattgaaaacgcagcttgcactgccattttattgctttttaatgtatttcttattcttttgctaaccccttgaaatatcctggtatctcctttaatctgtcctttattttctttattactgttttggaacaggtataggcagagtgtcttttggagctttcttaggtaggtaaagttatcatttctttcaaaagtgtagaaatttagccaracaatattgataaagatacttaactaataagaaaaacaaaccttcctctaattcagtgttcctcaggaactctctgatgtcacgtaaactggtggccatgtgcttgctcggctagtcatgggctgagtgctgttggcttgcctgttcaggggcttggtggccctgagtgaggggaaggggccgggcatcctgccatctgctgaggattgcatgagcccctaaaacatatttgccttttcagttgtaggggctgagctgctggaaaacacttccagggtcttcagaaaatgagtacacacaaacttaggaattccccttcatacagagatccagcgcttccctgtgtcatttattttacaaaggcctctaactctgctccatagatctttttatcccatccggcaacagtctaaagggatttccactatatgtagattcgaagtatgtaaatctccagtttctcatctgcctcttttcatgcggaattcaagtagctagtcattagcagtacagcttggtcctggtgagtagatggttcttctgtggagatgctgggagggtgacaggcgagaacattctctgggtgggccgggctcagagcctctaagagcagaccggtctgagtatttgtgttgcagatggaactgccagctgccctctgttgcccccagcccctcataaagtcagctctaccttagaaacacacacacacacacacacacacacacacacacacacacacmaaacaaaacaaaaaaatggctagcctagatcgtccaaacaaatcccacaggttaggtgagctggtgtctcttccctaagcaccacaactagtacttcagtgccttcacaaattctgccacagagtgttgtccacccattcagtggtgtttggtgacattagtcatctgcaaccatttttttttttttttttgagacgaagtctcactcttgttacccaggctgaagtgcagtggcacaatcttggctcactgcaacctctgcctcctgagttcaagtgattctcctgcctcagcctcctgagtagctgggattacaggtgcctgccaccacaccaggataatttttgtatttttagtagagacaaggtttccccatgttggccaggctggtctcaaactcctgacctcaggtgatccacccacctcagcctcgcaaagtgctgggattacaggcgtgagccaccatggccggcctacaacctttttttttttttttttgagatggagtctcactctgtccccaggctggagtgcagtggcgtgatctgagctcactgcaccctccacctcccgggttcaagcaattctcctgtctccacctccccggtagctgggattacaggtgtccaccaccacgcccggctaatgttttgttgtcttttttgtagagatgaggttttcctrtgttggccaggatggtctygaactcctgacttcaagtgatccgtctgccttggcctcccaaaagtgctgggattataggcatgagccactgcgcccggcctgcaatctataatgctttggttttgttttttccattaaaagaagaatgaattatgcccggtatgcaggtcaaacaattctgcagtcaagaaaacctgagatttggagctgggcccctgtaaatgcacagtgatgtttccgtggcaagcttagaccrtctggtggcctggccaggtctgtggctgtggccatgagggcccaggrcttcttggtcagctcttacctttttctctgtttcctgccaacagatgttgcctttatcaccaccgtgaccttcctgtggaaagtgtcggcgatcaccgtggtcagctgcctcccgctgtatgtcctcaagtacctgaggcgcaagctctctcctcccagctactgcaagctggcctcctaaggggctgtgcacccccagcgggctggccccagcaccttctgcccttcccagcaccttgtgcccttgccagtgaacgcagggtttgccattgctaccaagcaagcaccacaagaaagggagggtacgccaggcgagcccagggcacagatgctgagacagcctctccttctcagtgcagggacgtcacccctgccaggcaagcccagggcacagatgccaggatggcttctccctctcagtgcgaggcttcacccctgccaggcaagcccagggcatagatgctgagacagsctctccctctcagtgcagggacgtcaccyctgccaggcaagcccagggcacagaggccgggacggcctctccctctcagtgtgaggcttcacccatgctaggcaagcccagggcacagatgccgggatggcccctccctctcagtgcgggaacgtcacccctgccaggcaagcccagggcacagatgctgcgatggcctcttcctcttaagtgtggggcctcacccctgcttttctttctttttttgtattgtcaaaattgtatttccatattgaagcagcttgagtttctactgaaaatgagcccgaattatttcactattactgtaaagggttcatcttactctggcattctgagaatyagactgaaagtttaatttctgcagttccctcayattcagattctttctttgatgttataacacaaagtcattcctactcaaatgtaataaaattgaggctccacggaggcccgtgtccacatcagctgcagctcccactcagacagacggcctgccccacagcctgccctttgctgaagataccctcgctttatacttgcatttcgcttttcagtaaaaacagtcaagttactgagttctcacataaagagctcttctcacacactctaaaggcaagttgcgtaaacagtggcgtttccgaacgcaattccattgcggccaccaatgtaaatcattgcccagagactttgctgctagcatgcgtgtccttcccatcctttttctatttgcaaaatcacactcgaacaccatttctatatatagagatcagctgtcctgtaaaactcaaatcccctaagatggcccacttgcctggtcatgggtttcctattttatttggctggaaacaggcaccgattgaggtggatgaaagcctgtgcggctgccccgctgcattcatggtgtcgcccaaccagacccctcgcttctgggaagctgggaaggtctttggggccaggagttcgttttctcagttgtgtcctgtgcctggggtgttcctcgaaaccggtgtgttgtgccgtcgtctgcagccatgcctgttcttggaggcctcagcagaagttggtcaaacgccaggcctcttgtctcaaaggagagtttctccgtattttccacgcaggcggcagcctccgccaggagtttcacctgttcattttcttccgcgtcgtttcccatcagggtgggccccgtcacctgaaatgctggcggagctgtgtgcgtggggttccgaaggcgtttcaccaaccagcggagggactgcccagcacccacccgccgtcccccgcagcttttcagaggagaaaataggcacagagagcaatcaagctgcctttcttcccgataccgcatcagcgcctgttgaatggaattcctctgccgtcatctgtcggcgctggagcatcctgagtttccggacgggcccggccctgcgagggcgcgatttcctgcgctcccacaaggtgtcgctggcgtccgctcggtgatgtgggcgcgtctggtcgctgccggaggctgcctgggagtttcccttctgtgccccgagttggtgtctcctggaagtcacgtcctggctggggctgacttggatttcacctgtcttttcgcttctgccgcagcagtttgcgttaggggcattgggacggtagaaatcttaagtccacagccagcagctcaggagatggggtcacacactcaggcctcgggggtggaggccaagggcaaatcagaggctgctcccccgtgcacctttaaaagtaaaccacccacctgtgaaactgactaatagaataataacattgtcgataacctcagaaaagctgaacccctgagcctttgggaataacactgcagtacagctttcagatacagaaacgaccagccttcgatcagttggatcctgattgggagacagttgaagatttgtctcaagaaatcgagatgtattaagggcaggtagagactggaggaggaaggggtcttttcctccgtaaacgaaaatcaccccctgcgggggctgctgctgtgagggttaaatgagatgcacagggcgttcccagcagacgacgggcatgcagcaaggcaatcagaacggggtctgtgacacggattttctgctaaagaaaataatagcccactaaagggtcattagatcggcattagatctagttccagctctagttcaggagccagctcgggtcaggcgaggggtggagaggctgtgtttccacctgcttgcggcgtaacctcatcgctttttaggttctggacctgtgtcagccctagaaattctgagccggccgtacagccccagaggccttcaggagggcgcccagcctggggagagcattctgcatgtgtggagtcggcggtgctgcatgagcaggagcccattcctcgcttctgcgtgtcatgggcagcgtccagtgccgcgctggccccgtgtttctaggtttacatgtagaggcgtgaccctcacggtcctgtccgcggcccggaatagctggtcacaggaaggtgcgtgctgcggaagaaccagcagggcccgcagcctcgggagactccttggaaaggggaggttgaagccgagaccgggaagatacaagcaaagcctgtcatcagagcagctcatgctcagacccgagactggggcctggtgctctggggtgatgagagcagagtgccagccgctcagcaggggcggcaggcaggcgaggattcgctactgctttccatagtctcatccgattccagttcagtgacggccaggccttgagggccgcactgcgttcctggagcccataagtctgtacccccgatggccaccaccagtgccttcctctcctgtgagggcccagcagacaaactggtagcaagaccccgacagtggaccaaacaagctggccttacctcccttctgtgatggtcatgggcaggcccagatgcaccctccctagggtcggggactccgctggggtcagcacctccaagggcccccccggcacagctgagcaaaccccttggtcccactcagcagcagcacccccagccccccagtccactgcacagggccagactcggcctgtgggcaccgccctcaggcctgtgtgtctctttacaaagatgccttatcctggagacttccaggttagttgcagaaatcatgcagaaaccacggagctcacacagcaaactgtcccccacccaccccgcttccccagcacatatgtcctgggccacagaggggacgccaggccccccttgctgggctgcaggtcctgccactgcagatgggtgtcatttcaggcggttccagaagggggagccagaagccacgaaatggcacctgcgaggccaccagggtggacatcccagctctggctcggattttgggggttagagaagtggatggcttggggattcctctgaatatggtgtcctgttgagcaccaacaagcaatccctgaaacggcgtccccaggaaggccagtttgctctagctgaagagtttccaaccgtcccacgagcacttgtacagaggaggcattacttgtgtctggatgggaattgtgtcccccgcagagggctgcagggcagcctgaactcccagcgcccatcccaggtgccagtaggcccctagggtgggccttgggaccacggccaagcagaagcccaggaggaagggggtcctcctgccagttctgccgagtcctaaatgcttactgctaatgacaggattttccaaaatggattgtcctgcacctgtgggcctagaagggaatccaaaaatcctccagccccacctctacctgggtcctgagagttctgggaccagaagtctccaggcgctgagctcgtcggcgctgggggtggacgtcgccctggctgtgacccaagatgcgaacagaagtgttggggtccggatctagaaagatgggttagcacagacatcgtttggattctaacagaccatgtcctggaaaagacacaacgtggcctttggaatattcgcccctcgttaaggaagagagggaggccctgagatcaggcgtcgctgcaagtcagaaatctggattcttaggtgaagtctccgttttaaaattgggctcccagcacttgttggtgtcattgggttgcctgggatactgtgtgggacagctgaggggcaccgtctgccgtggccagttcccccgtcaccgcaaagcccagcagcagtcagcctcagaccttcttcctgtcctgagaggccctctcacagcttgcctcagtgtctccctgggatcaaacacggctgtgtttgaaggcgggaagccagcagggctcttgccctggagtaatgggatgtcatgattctcactgatttccttgaggagacctttcctcagaggctgcgttgccagccccgtgcagagcaacccgcggccctgtagaccctgttccttccttggggcatcctgctgcggtgaggcctggcaggatgactcctgacctcccccatgggcccaggaagagatgagcaaaacgagggcagtcccgagtgtgcccctcctctcccacctgcagctgacccgggccaggctgtgcaggagagctcgggcgaggagaaggagctgcaccaccagcttccattgcaggcgccctctgccctcagggacacttttaattgtctgcatttcggtttgtctgtactgggtccagttgtagtccctcagaagttgtaaacctaaaattcactgtctgtaggtgctggggagaaaatgctgcccattctaaatgaaggtttgttcctgtgcccacactgtacgtccagcacgatcacaggaagcactccgccagaggaggagagtctacgagagctcccaagttctccccaaaatagctcgggcgtccatgcactacctctgggctctgggactgcccccttcacttccataggcaatggggagccccatgcagacagtgtgcgttaaccggggtcctgggccacatgttgatgctgactcccaggcaaagatgctcgtgtggaccctgcagggccggtggtcaggggctgtgagtgcccagtccaggatgcgccaggcttccgggccacctcaccctgctcctctcctgctgacccgccaggatgcaccaggctccccggccaccccgccctgctcctgtccacccttcttctgtcccactgccctgtgtcctcttgacctgagcctcggcttgtccagctggggccgtccaggtgggagtgactgtctatgacgagagaacgagagagaaccgggtccacaggacaggagcagggtgccagtacggggacgtcacagctacggtcccctcaccaggggcactggctgtctctggctctgcctgtttctaggaaccacctggactgatgccagccacggcccctgcgaaaattcttgcagtaagaggagagcagggtgggccgggagagaatcaggccctgggctgcgccgtcatcgctcagctctcagctctcagtgacctgaggaccgggagcccagacccatcgtggggactgtgcagggggcccagccggggcagggggtgtgcagggggcaactgtgccagggaaccagcagagacatggctaacagtacagcctggctaagaaccatggggttgtgcacttagggaaccgcagcagccctgacactgactcatggggccggttgagcagggaggtgccggcagcaggtgagctgtggggcctggggaccaaagccagcctccctggctgtgcgggctgggagaccttgcagggctggggcacagggaacccgaaatgcggaaccctaagcacggtctgtgttggaaaagcccatcctgggctggtctgggcatcctgatcctgggtcatgcccacctgcacccgtggggctgcagcctctcctctggggcccggctcggttgcctcggctcttccaggccctccccggaccctgccccagtccacaggccacccgtgggttctgaaacgcgcccctcagtgtggactcaggaagacaggccatcccctgcagcccttcccagagcctgcagctccagccccacacgagttctcaggagcactgcgcagcagcagtgacaaggaggtgcccgccccactgcaggttgcccagagctcacggccacccagatcatgcaccgggggacctgcaggtgtgttgctcccaggtgtccaggctggctggtcactcagctgcacacctctgcagccccgtgacagtcacaccgcccagaagggaacaccccgacctgcagccccctggcaggcccactctccaggcctaggccagacccatggcaaagatgggggcaccctgttcccctctgccccagcctcctgtgaggactgaaaacctgagaacacaggagtggtgagggaggtccctcagcggtgaccagacaccacacctgccgtggggagagagagagggacagag

SEQ ID NO: 94040 - DNA, 257744 bp, Homo sapiens
  misc_feature (1)...(257744): n = A,T,C or G
ataaagtaatgtgcatagaatgaaggtacattctgggaacagagcctaaacatctcgctcgtgtattggagggttgtgcatataaaggtggtgacacaaagtaagcaatcaaaatgaagaaggctggggcaaagaaagtcccttacaagtctaacagtataatgatactttaaccatacactatgcattaaattaatatataacacccatgattatagataccaaagcctaatcttcacttggaataaccaggcagctttgctattagatagaattttacatctcaacctaaatgttaaactaaaagatgttaattatgtaaaacttaagattaatttacccgtttctttagtgcttctgcaaaagaattggaagtatagtggccagcactgcttagtgtatgtattgtatggttgtgtggtaatccactttccatgcctcaatctcaatcacaagcagggttctcagccatgtctccaacaacccccaggacatgagtttccaaagcacctccagctgcattgtgagttaacaaattagtgagcaagcttttctcacctacttgactataagtttctcccaaaggggaccaattcataattttgggggtcccagacaatgacaaaccaggtaatatcaagtaattaataagtgcaattcctcccaagataggaatatcctctgatatctcttttggattttctggacttggtcattttttggctgatgcctttggagatttaattttaaaaaatttttaacagctttattaagatataattcacataacatacaattcaccttaatataatccattagtatatttacagaattgtgcatccatcacaatattttttattaccctaaaaagaaactctgcatcagctgtcatctcccagtgctcccattccaccccccatccctcagcaaccattaatctttttgtttgtgtagatttgcctattctggacatgtcatataattggaatcatacaatatgtgagcttttgtaactggttctttcacttagcatgttttcaaagtcatccatgttatagcatgtgttattttattactttttattgcagaatataccatggtatgaatataccacattttatttatcacttgagggacatttgcattatttcccctttttggctattatgaataatgtaacatttgtgtataaatttctgtgtggacatctacttttctcttaggtgtatacctaaaagtgtaattgctagaccatatggtaactccatgtttaacatttaatgaattgccagactattttctaaagcaacttcaccatttacattccaccagcagtatatgagtgctacaacttctctacattctctccaacacaaaattatctatctttttgatcatagccattctactgagtatgaagtggtatctcaggtttttgatttgcgcttccctaatagctaatgacattgagcatctttttatgagtttataggccatttgcatatctgctttggagaaataactatccagatcctctgctcattgctcatttttaaattgggttgtctttttattagtgaatcataatagttctttttttttcttgagatgggttcctgctttgtctcccaagctggagtgcagtggcgtgatcatggcttagctccctgcagcctcgaccaccccagcccaagtgattctcccacctcagcctccaaatagctggggccataggcgtgcaccatcacgcctggctaatgttttaattatttgtagagacaaggtctcaacattgctcaggctggtttagaacttttgggattaaatgatcctccttacttggcctcccaaattgctgggattacaggcaagagccatgtcaccaagcctcataatcgtttttaatataatctaggtacaagtcgctaatcagctatatggtttacaaaagttttctcccattctgtgggttattttacaatttcttaatgatgtatttggaagcacaaaagtttggtttttttttttgtttgtttgtttgtttttgagacaaagtctcgctctgtcacccagactggagtgcagtggcacgatttcagctcactacaacctctgcttcctgggttcaagcgattctcctgcctcagcctcccaggtagctgggattacaggcacccaccaccacgcccagctaatttttgtatttttagtagagatggggtttcaccatgttggccaggctggtctcgaactcctgacctcaagtgatccacccacctgggcctccaaagtgctgggattacaggcatgagccactgtgcccagacaaaagtttttaatttgatgatgtgcaatttatctattttttcttttgttgtttgtgcttttgatgccatatgtaagaaactattatctaagttaataaatatttactatttttctctgaagagttttatagataatttaacttttacattttgggtgtttgatccattttgagttagtttttgtgtatgatacaaggcaggggtccaacttttttctttggcatgtggatatccagttgtcccaacatcctttgttgaaaagactattctttctcctatttaattttcttggcatgaaaacttgatttccaatctgtttagttccagtagtgacatcctcttagttcttttattgtatttttttcctttgtaatttcaactatcatttacccaactctgggtacctgacagtcacctctgatttgaatgaagtttaaacctgagtctgtaggccaatgaagttccattgatgtccacaccctgctgtgacagtagaacagagtagacgtatttacacatactttattttctctaatgacttaaaacagccatcctaattcaaagagaaagctaaggacatgttttcccatttagtcctacatggcacagttattgggaatgtaatgaacatctgccactcaatgttcattatattagaacataatttacttagtaaagttgaggaaaatttgtggcaaaattcaagggaaaaatgtcaaaaaaaaacccacaaacgcttaaaagtgggcatattgggattcctagcatcattcatttagaaggctcattaggaaacaaaagtatcctaagatgacattgcagactctcccaaatctggcacctttagtctccatacatggattcccartgaaaaacctttactgtagtcaagtcagtctctttgttcctgccaaatatatatgctcctctatcactccactgaccttaaacattcattaaacaatgactaccaagcattcccactagaaagaggtctcctttttatttctatagaattaacccctactttaagatctagctcaacaatgttgatcaccctagctcttagaaacttagctttctctcaaagtccatagttgctgcttgtctatttggcatgacatattagccatcttgttgctactgctgtttagctttcattaagtgcctctataacctagttctctggctcagcacctcacacgtgttacgtattcaatgtatattttgtggaggataaaacctggatcttagggaagttgtccttaaataaccctcttccttctaagtctatcagcagtatagtcatatgacctraaagattttaaatgatcttgctgacwtctgaattctactacagattccrtgacaaagtcatgtggctggaaccggagttccctgccaggggctggcacattgcacttctcacacaatagaaggtgagacgatctgagagccttaaaatcaagcagatgcagattaatgcaatcctcaacttcaatcaagttctgaaccaataaaaatgtgtgatttctagcagtcaggaatgagtggtttttaagaaataaggtagttgggatacgcttgccattatggataaagtgataatatcagggaaaggacacacggtaatctatagactatatcatgcaatattcttctctgtataagtgacttgtttcctgtatcaatgacgttttcaactttgctgatgagttaatgggacacacatgtaaaaaatggattgctctatacaaaacagaggtaacttctggagttccttcagttattacttgtaaataagcagaattgaacctcaaccccatctgaggactaattaggaattacaaaggtgattgctcataaatgaactatcgtcatgctgctgcgcactgatttttaataagaactggttatggcttcatatagaattacacctaaaatgttaatcagaaaagcactgcatttcctccagtttctgttcgctaacttttaaagctgattattatttttactattttccttgctatgttagccctttaattttgtttcagactcatgttcattaagccagagcaagcctgctttatacaaggagaccctgggccttggaagaaataaaaatgcccagtgatgacagtccagataaagctgtgttcattttttacgtttagaagaccatactttaaatcatgactatcactgaaacagatagattcatttattgttgagtcctgctttaccctgagatgttccatgaacactgagaatacattttctttgttctaattccagcctctgaatcagagccaactagagtgggctcttcataaatatgcattgactgcctgagtattaatgtagggcagggctctgattagcaagtgctacctgcaggaagcagaagaaataccacaaatggagataggacgctattagcagattttatttcattttttcctgaggcttggaaataatcacttctctctcaggtcaaacctctccagctctctcccttcaggatgtgaaaagatctcaaataaaaggcctctatgtgaggatctctttcgctggttgctggaggaagagcatgaaatgagggaagaagcaaattgcttctgatttattgtttctggtttattcctttcctgccagttcagcagctcgccagaaacagcacaaaaccttacatcttaacttgaaggtgaagtatttgttttgacaactttttagcatagatctcggtatacaaaataaaaggtaatgaggctatgatagtctgaaggacatcggcaaattaaaatttaacatatttatggattttatacaaagactcctctcccctttgcagataaaacgactgcatccaactttatgcagatttaactaaaagaaaaaaaaaaagtcttttgtgaaccacctgggccaatacttagttggcttaattgctatttcagtgccttgtcaggctgcagagcctgaactagggagatgcaccgggcccacttgcaggcggggcccagatgcacccaagccccatggacaagagcaccatgggcaccaggggcctcccgacctggcagcctgttgctagtgggcgaggcaggaggacaagtgcggctcaggccacgagtcgggctgggcgtgcagagaggttagaattacacccagatggcgaacagtcagtcgttcctttcctgctctggctgggagctaaaccttgtagtcccagaccctttcgccttcgcctgccggctcagacccaacagctctttccggacgacgggcggctccactgcgatcaaaagccaggggtagcgggaggggattcgtgagaatgcagcagccagagcagtctttcctttctgagcaagatgtgagagagtccgagtggcctggaggaggaaccgggtcaaccaactccacagggcggagcgaaaacgctggaggactaaggaggctaagagttgatcccccctttgagtcgtgatacggtccgaagcggggcggggcggggcgaaggaggctccccctggctctccccgcccctcacccgccttccttgctgagcggccgcgggagggggagcgcgagccccgcaggcccctcccccggcgccggcgcccgagctccgcccctcgccgagccgcccctccgcggctgcagcaagagctcgcccagctctgcgggcgccgccaccttcgccgccaccgctgcctttctcctcctcctgtcggcgtgcgggggccgcgcccggcggcagctctgccctaggtgggcggcggcgcggcccaggctgcagctgagcgctctgcgcggcgcagccgggtctcccgcgtgtaccacgccgtgacaggtgcagagtccgggctgaggacccacctgcagccgccgccgcgatgcccaccatgcggaggaccgtgtcggagatccgctcgcgcgccgaaggtaaggggccgccgaggctcggggctagcccggggtcgggaagcgagtgtgtgtgtgagcgtgtgtgtttatcctggaagagaccgcatcctacctcttccccggcggcagtccgactgtcgcgcccggcccctaggggacccttccccccgcgctgcccccagtgtactcgcagaccctttccaggctccagtaccctcgaatgggtgttctccgcgggagccccgaggcgtgctttgcaccgcagtgtgaccattaggtcccagtcactgagctcactcgccctgcccacctccctccccaccagttcgatttccactyagcagatccccagcccgccgcccctgcctccggcgcccaccgttttgcaaccccctatstgagctcccagcgaagcgagtttgcttttccccggctgcaggatcctttgatccgtagtcccttgsctctcgaagcgcggggagccttcatcggggtcgggtgccgagtgggttccctgcattacagcttctgcaattctgcctcctgcagcggagtcccaccggctcgcgyctgaggtttcgtttttgtgtttcccttttgcccgaaaccctcacttcggccagctgagctgacttttcagccaggtggaagctgttttctttgctccacctggggccagctcttgaatggccatggttgtcaacactgwgcaacaratgctccggggtagaagcaagtaagctttccgagggcccagactcttcatcgtctccgaggagccctcaacatcctgcctgccatgtggcaggcactctgtaaatattatttgattttgctcgcgtcaaagccaagactgtaaatatcccaaggtttgtttgtcctctcccataaacctgtacttgaatcctgcagagggtggaataacatgtttttcagaaatctatcttgccatcatcgctgattcccactcttcctccccacctccatcttttaatgtgagacaggtggtgaagtggttttagaaaaatatataagttaggagaattggatttcagggatggagacaggccattttttctccttaggggctccctgtaaaaatagggtccctgaaattttctgattgcagtatttaggaaatattaaatgaaactgctgtggggagaagacgaagcaagattcaaaactggcctgtgtactacataggaattcggtacatgctgtcatttgtaatacccaaaaaatacttatatagggcattatagttttacatacacagttgaatacattatacttttaaaatgcacactgtaaaaattcattttttttacacttctgagtgaaattagtcatagagatagtgaaagtagaatggtaatagttggtggtgttcttttaaataatagcaattgatgggtcctatattgtgggaaatarggggaagagaaaaagtctgagagcactgcaaaacctgtggcatgtgaggggattacagggctgcagtattgttcttgattggcttgtgtattttccaaagtacttttacaaagattactttatggaaacttacaacactcctggaggttggtgaaggtggagtgccatctgatagttgaggaaactgtggcccatatggtttagtaatttgcccaaggtcaagtaactagttcagtgacacatttggattaagagctctgggaaaacaaggactgctgcttgtttaatctttgtattccctgtgcgtccagcacagtgtcagggccatagtggtgcttggtgagtgaatgaccctttcccctgagattagttgattccagtttattatagcttcagcatgtgcttgggactgtggtgaagacaaataatgactctgtggggctggygttgtggctcattgcctgctctgcccacacttttctttcctaggaaatatttctttcctaaraaatatagtcctacctttcctaaggaatattctcctttgagagaggccctgctgcctagagggccttgttctgaactgcagcctttttggcctcagctgattggactatggttggctcctgacccaggktcaaccaattcttatgtgactcagacacttgtaaccttgtggtttggctcaaaaagagtctctgtgttaatcatatctctcttgaaaacattaaagttagagatttagagtaaaagcagaagggagcagaggtgaataggctggtatgggagagaatgggtggccataataagtcatgggaatgctgctgatagaagaaagcagaaactatgagtgagtagagagatagcaaagaaaatggaatggatgggcagacacagatcctgagagagggtggcgagaccttggagcctgccctcccgaattttatagccctagttcccaagtagcattaaaataagctcttttcccccccttgaaatgacttgaatgggtttctgttcccttcatccagattggccagatgtatgactgtcatgcctgtaagttgtttacaaccaaastggggagaaaggacttaaagagggaataaatagtctaagaggggatgttgttaattaaatattgtgcatgctgtgggggacgcaggacctgtggaagattaggaatttagtacatacttattactgaacataaggcctgctgagtgaacatttcattgaggtgtgatttgagatgagccctcacacagtgcttctcaaactcgaaggttcataggaatcacctgaggatcttgttaaacgcagagtctgattcaggaggtctggagtggggccagagttactacatttctgacaagaatgtaatgctgaaggatgctggcctgcagatcacagtctgagcagcaggatcctaaaggatactgacatctatttctgtagttaggagagtgttgaagacagtcataacaagaacaaatggggaaagtgaacatggcttatttcagagttcttaaggaaattggccgggagcagagggaaacttggaaggagcaggctaaaagtttggataggtagattactgccagattacaaagcattttaaatgccaaggtgagtcatttggacacaggaccgaatatttgaacaggttcttagagttcattgaatctaatttcttatttaagcctaactccaatatataatatctaacagggccagttgggggccacatcgttataagggagggacatcctaaaagtagtaacttagttaagtctggaagtgtgttggctggtttggaggaaaaggtatggtagatagactcttttgcaaaacagtcttaaaatgacaaaagtcagaattagtattagagtggaacagtgagaatgggaagggaggaatcagatttctgactgaatcattaactcattcagcagatgtctactgaacttcaactactgttacaggcacttgggatacatcagttaacagaagaggaaaagcatggccctggaggtgcttactttctagtgaggcaggagacaaacaaaacacacacaaaatatgctaattatagaatttgttgtgtggcaaatgctatggggaaaatgaagagaaagcaaaatgtttaaggtgggtggatggattgcaattttaagtaggttagttagactagccctcattgaaaagttggcatgaaggagataagggagttggcctggtggggatctgggggaagggtgttccagccagagcaaatgccccaaggcaggagagaatcgggaattaggaacggtgaggggaagaatagtaggaaatgaggtcacaaaggtcattgtgttagtccgctcttaggctgctaataaaaacatacccaagactgggtaatttataaagacaaagaggtttaatggactcagtttcacatcgggaattaggaacggtgaggggaagaatagtaggaaatgaggtcacaaaggtcattgtgttagtccgctcttaggctgctaataaaaacatacccaagactgggtaatttataaagaaaaagaggtttaatggactcagtttcacatggctggggaggcctcacagtcatggcggaaagtgaaggaggagcaaaggcaaaagagcgtgtgcaggggaactgctctttataaaactatcagatctcgtgagacttattcactgtcatgagaacagcacgggaaagacctgcccccatgattcagttacctcccaccaggtctcttccacaacacttggggattatgggagcaacaatttaagatgagatttgggtggggacacagccaaatcatagcaatcatattataggactttgctatttagtgaatatttagtaaacatagggcaggagagagaaggacttttttgaaaaaagcaagtctcaacaataatttagaattctaatattaataagttaccatggatcttattggtaatagcatattgatattttattagtaataacattggtagtaggttcataaattatcagggatcttattgggctggcttgtgaagatttagttgagtaaatctgtggtgggcttggggattcgcattcttaatgagcctcccaagataccctggtgctggtgaaacacattttgaggaaatttccattacagtcttgagcttgactggttgagaaaatctattaaacaacaaggaaattgggaaggaggactaataaaataagagatgatactaattcaaattttgaggtaacggggacatccaaatggacatgttttaaaggtagttggaaatttttaggtgagatgtgggaaacctcaaacttgggaatcttgagagacaatagttgaaaccctgatagtggaaaaatttgccataaggcaagagtagataaagcagaagactaagaattttaggtctctttatttagctgccccagataaatcaaatgggtgtttgaacttagcatttgaaatctggaaacagactgaaataatggtagcttacacaaaatagtttttctcactcctgtaaaactagtgtggaggtagacagggttggctgtgcctgctacacaaagtcataagggatgttggctccttgtgcctttctgcttcactgtcctgagagtttgwcttccataaagtcacagcatggttgctggggtgccagccatcatgtacaatagttttagccaggagaaaatggaagggtgaaaggcaaacaggtttttcagaaagcaccacacaaaaactaatgcttattttgcattggtttccacttgcagggcaagctgggaaatggaaatttccagctggacacattacccagtgttgtgttacaaacggaaaagggtgtatggttattgagcagtgcattagtccattttcacactgctgataaagacatacccgagactactcagcttggaattcattgtatcattatcagcattttgggtcaaagccattcaacaagtctctagggagttccatactttcccacattttcctgctttctgggccctccaaacttttttcaacctctgcctgttacccagttccaaagtcrtttccacattttcagtatcttttcagcagcaccccactcttctggtaccaatgtactgtattagtctgttttcatgctcctgatgaagacgtaccgagactgggcaatttacaaaagaaagaggtttaatggacttacatggctggggaggtctcacaatcatggcagaaggcaaggaggagcaagtcagatcttacatggatggcagcaggcagagagagcttgtgcaggggaacttccatttataaaactatcagatcttgtgagacttattcactatcacaagaacagcatgggaaagacctgtccccatgattcagtttcctcctactgggttcctctacgacatgtgagaattgtgggatttacaattcaagatgagatttgggtggggacacagccaaactatatcaggcagacaacagaatcagtcacagtgaagttctcagattgccaaaggctcttgcttggataacatagaaactgctctggagctcatactttacatataataaggattaaattgttcagaactaaagaaatgcacacacacaaaaacttcacatacctatccagtggtttgtgttttcttctgttgaatactataatgctaaaatataatgacatttatttgattatgtaaaatatgtgctaaacgatgtatccagaagttgttttaggaattgtttttctaaatggcaactctaaaatgtttgtaactatgtagaatagtatgttttatttacataaaaggtaacaaaaggaataaaaagtaatttaagctgtccttaaaggaaaaattttaggacgctmttccaggtaaaagatgactaaggtttttgttcctttaaaaaccacttattatgcaccagctgtgtgccagctaaatgggtggtgggacaaaaggctgtgktcgatgaaggaggtcccaaaggaaacatggagatgagtatggagatgagttcagttttacctgaagtggcactgtgtgagaaggtgtgtrtgagtatagcgatacagcatgtcatcaatatttgaaaatctcaaagtaggtgtcattttacttagtgtaattctggagatataagtgtattagatctgattattttaggttttctatcttcagtgcagaattcatggtttgttttttctgtcatttcaaaaacagaattgaagcatatacctaatgttacagctgtgggaatgtttgcaaaggtcagaggacacttttgaagttaacgaaatgtttgctgcgtgggtctctattcacatggtttcattggaatgtcaatgacatgaaggccaccactttccccttcattctttacttcttagtgaaaggagcccaaaccttccaatgattgtattctccgggtagtaagctccctaagggcagggggttttgtctggtttgtccactgatatattgctccccatgaggacattgcctggcacatagtaggcattggttaaatgaatgaatctatgtcctaaagatgaaaatgccttataatccaatttgtaaaatactcagagctaaatctagatgtactaaatctagtaccctcctactgaaaccttagcaccccaaaggagcgtttttgtgagatttgttcgctgctgtaccctctacacctagagttttgtctgccacatagccaccactctatatttgttgaatgaatggataactctgagctttgtttttaatggaagagcttaactatgagtcttgatagaagtactgcctgcttactgggaaaaactcatgcttcagaaagtcttgcaggagagagtaaaattcatcacaaactatgccatccaaatataatcacattgtgattataaacttttatatacttcatataaatttatatatttacaatgttagaattttagtatatgtccttcccaactattttccagaaaagatatatttgttaggaagaatgaggtaatctgcattatttttaataattttatggatatctgtgccaatatagatttgtgtaaattttgtctactgtcactagttatatccttagtgcctggaatagtgcttgacacttggtagcagctcagtaaatttttgttgaatgaacagatcaattttattaattttatgacagcttagcatttttatgttagtacagaataacttactaaagaaccctgtgggtggacatttaggtcatttcagttttttaaactcttgaataagcatctttgtatctttttgtacacctttctgatggttttgttcaaagtccctagaaatgggatttctgggtcaaaagtatatatctttttatgacttttgatacatatttgaaaattgctagaaagattatactggtttacactcccactgaaagtgaatgagagtgcctgtttatcccttttgcagcactgtatagcatttttcttcctccttatggatatagaatgtaaaaagtaagtctttaagtttacattgctttattaggtttaacatattttggtaaatgtagtgattatttttttctgaattgtttatcaagttttgtattgaagtttaagaacttatatgttaamgataataccttttttccttattcatagtttatcttaactttgtagtgctttaacatgtatgtaaattaatttttatgaagtataatctttcctttttttaaatttctgctttaatgtcatatttttcaagataatttttcaattatatttttcttttagtacttttgggtttcattttaaacagttatattagtaattcctgtgtgatttactttgtggtgaaatgtgaggcctggatctaagtttttcctcaaattatttacctgacataataaccatatatttaataatcctttcttcccacactgatttgaggtgcttccgtatgtatatatttgagtttttttctggagtcagtctctctttcccttccccccaccccacccgccgccacctctctttattttggtcccttttagcccctggtatcaaattcctttattgcaacataacaaaaaatattctcttagctgtcccatttgctttgctcttttctctaggtttttctgggttttctttcccccacagttgtatttttctactagaatttatgagtacatcattgaatcaagttaaaaaacatgttggaatatttattggaattgcattgtttataaatttatattaagagaattggcatctttcttatattgagtcatgtatgcttagtttccctcttcaattattgctactttgatattggtatcagtctgaattcatttcagtttttcagttaatttttgtctctgtaggttttaaaattatattgtatgtcttaaagcaaagtatttttaaatgaggttttaaattaataagatttgaccaggtatmtgttggttttactactttttgagcaagaatggttcatttctatctgctgatgtattgtggactctgcttccaacttaccacttttattatttcatgtagtggccctgacatgatagctgagatattactcttttttctcctttttgctaggaataaggtcaaatttagaccaactagatttagctaatggttccatggaatctacttacaaatcagcatttatatctcagatcagcactaaaagaaataaaacgtgagccacaatcaagcagctacatttaaaatgtaaaaagagatgttaaatgaattttaatactatatatttaatattaaataatacaagtaatagtgtatttaatatataaatactaatatgtattataaatataaattgtctttggcccaatatatccaaaatattatttcaatattttgttataaaaatttatgagtggtagtttacattttttgtgctacrttttctaaatctggtgggcattttatagtgcatctcaatttgtactatttcatgtgctcagtagctacatgtgactagtggccactgtattgaacagcatagttgtaaattatacctctagcatatgcttacttgttaggatttactagaatttttcagaatataaaattttgtgatggaaacccatagctcaaagtaagcttgttagaaatacatatgtagatcttgaggtttaagtcttcagctcccttcttaacaacagaaggcagtcacgtgtgtataaaacttcacacattatatgggtgcttagataatactgcctttgacttggcccttgtggcartttagaggttttatgtaagtayattgtggcatcttttgtagcctgttttgtttccaattttttaatctcttataaaatatatttgataaataaaacacyctgccatgtcttcctattcatttttatttaaatgttagcatgagatgtgaagtagataaaactcttaagtagtattcttttatgtacaatatcaccatcacttgtgctaaagggacaactgtatagaacttggcttcatggattaattagacctctaattgacttggcaaagagaggtgtctgttttaaattgagcctctgttcattattttatgtgaattatctttaaaagagatgactgatcttgatccatctagggctgtgcttaataatatcagattagttgagtgacagctcagaatgtcactaagaaggccaaagccagcctgggttctggaccagagcaccactttagtgggccagacctgtttagagtacaagattggcctttgtgagtgaaacaagcaaacaatggtatgcagggttgagtcaaagagatggtttgttctgatgccagcctacaccagttcagcttctgtaattgacctaggtccctgtggttaattctggtcctgaagtaaagctaacgttgtataaaacaaatcttccagcttctacagaccgtctttttcccgtgtcccttcctcaatcccacatagatttagtcccaaaaatctttaacgtcracatttgaagagctctgacttagcactctaaagatgaggcatgcacaccctgtcaccacttccctgaccctgagtgcctgtcscagcagcttatagagctccaggatgggggggcctgccttgctcttggcaggacaagatgctggttcccaaccctagcttggactccagtgctcagcatttgtgagccgttttgatgccacgccaggcctaccaaggtttctgagtatcatttgctttcactttacccacagttgcttttggccagctcacctgaacccacatcgttgccccatgcaggagatctttggttctgagtgtaggtgttgcccatttccatttgtcctggatctgtcgctccaccattgtattgttatyccagtggctgcgactagttggccctttccagttcccttctagtctgtctcactctacttttttttttttctctaacctaggccatgttctgtctctgaccaaagaaatgagatgggtctaagttttatccaatcctggtggctgctctacatgttaagctgggttcagtctaccatctatgccagaatggttgtgataaatattctcagatggacttmagtcaactttcctaactttattttcattgtcatgggtaaatgttagagaaatgacatggggaggaatgtctctgctatctttaatgaaaagtgtgtccaatgtggacagggcagtgggaggcttgtgaaatgtaaattgtttttatagccacatcgtgtgatgctcaaccctggcttcatagtgaattagatagggagcttctaaacaatacagattcccagacccatcccagaacgatggaatcagttggtctgttctatagggatagggaccaagcattaatattttatctcctaggtaattctcatgtgcagtggtattgaaaacactggtatasaaccttgaatttacttgctggcagagaggatgggaataaattgtatacaactatataggttgcgagccaagaaaccaagagtattagctagccaagtgatagacaagcaatttacccaaaatatttaccaaagaaaatcaatatttttggtaaattgtgtatcatccagttagctaataggactaattatactcctcttaatttcccctctcagaaatgatcaaggtcatacattaatactatttattaggttttgaagactttctttaaaattctgaattgaacattcaattcagtacaactaagtgaagagtacaacacatttagtttatttttagctggtgttatatctactctgggagcttgttcaatatgagcttttctgcagtgtcattactagttttttggtaacctgcttgcttttagtatgttgtagtaattagttgctttattcagcctatatttgtagcccaaatatttagtcatttgcagctgaaaaaaatagcataatgacttggtaatagtctttgaaatttctgtggcaactttttttttttcaaggagtatattttcgtcagtctagatttattgatttatcccattatgacatgaaataatcttttataggttaacgtacaaaatgtgaaaactcccaatttacctgccttccctaattgctgagatgaggccaatatttgagactctttatttggccattgtgtttctcggtggccgctctgatgggcgctgggttctagctttaggatgctgctggtggccactgccrggtgggaagattatcacttgacgctctggggattagaaaaacaccatagtactgtagatcaagtgcattgtgtccagcattcgtgattgctgtttattttatagttctcatctatccttatttgtctctgcatttagactttccttttattaggtgataatgtgatttgtactttgcagatggaaattattttcaaaagccagaatttgatcttgtagaggttggaaagttctgaattgttggctcaatttaaccccagatggcaactgatttctgtctcttcgtttaacgttcagtaagagaatcattacatgagttggccttttgttgacttccaagtgaatacaattagcaaaagaaaaaactctcttaatttccccaggtaccaaattgaatcccccttgaacttattaagtgaatttccyggtggaatttatccctgtggttggtgaaccactctcctatatattttcattttaactaagccttaatacgaaggccttcagtctgaacttagtagatttctttataggtcagatatttttccatatgttcagctaaaattgrccttttaaacaaaaattcattgaagcaaataaatcaccattgttactgtttgtttcatgtgtttttggtctgctcagtaccagatgacacggtagccacctgcaagtagggcttttttgttttgtgacataactacgcttgaagctatctttaacatcctaagctaatgccctataaataattggcgagaaagtgaaacaaggcactgggacttcctgtaggcctggagtgatatgtgtgttctggcccttcaaagctgtgcggccttgagcatgtcacttaacctctgtgagactcctgtttctctttgataaagtgataatacctaccagcgaatcatctgcctgttggatagtgaggagaccaagcctggctacacactggaatctcccaaggagttttcaacacactgacccctggtcccacccccagggattctgatttcatcttgggggtaagggttgaaacaaggagaaatgatagtggcttcaactactaagcatcagtggacatgatggggagtggtcaagattcagaatataactagaagatagatccaacagatttgttgatggctaggttatggaattttaaaaaaaggagtcaaaaatgactaaagttttgggccctgagcccaaaacagtggtgccatttaccgaaatagaaaacactgggatgaaggaatraaaaccagcttgcatcttagaaaggagtgagaaagtcccatgtgtcaaaaatacatatgtttgtagacatttattttattctcttagagtattgcattcatcctaaaatctggatttcagaatttccatcttctgtttccctcatcttcttttctctgaatattctttagaatttcagtaaatgcacctgttagtgtaatacgtgttccccattgctatgaattttaggtatctgggaactgtatggatttattctgtttgggatcgataattacattgccaggactttttgctgcccagtcagagttgatgagaacagtctttcacgtgatcactgcgttcttttggctcttgaggtgctccaaactgcagggacattttccagagtggatatattaaatgaaagcacttactataaagtaggtgctaagcaaatgttttttgaatctgcatctggtgagtgactgggataagatcaggctgttcagattttggaaactgaacttttaaaaacgctggagtggttttgaagtcttcgtggagttttcttatattcatctgtatgcccatcacaccttgcatggcagtggtcacggtataccagcaggtctagggagctaatttcatgattctaattagtagtagtagcatcttgagrtaaaatgttgcattaggaggtacttactgcatggagtgatttttatttatggcattagaaggttcttgaagcatttgtttcatccaccctcgcatcgtttttgttctacctgtggattgagtagggcgtgcggcaatctcacacatgtgtaggtgtcattgctttaatgtcactgagcaatgtgctgggtcttttcagtctttgcagcccaccagctgtcattcacacatcctatcttaatctgtttagtggaggtttctgtcgtcttctttagctacatcctgacaaactgaaggatgccgaccattccttactttgttttgtgaaaatgattcttggctttttgagccagtctcatctgaccagtcttagtgggttcttcagtactgcccacagtgcttgtggtagatgagccatcccagagccacacccattctcagagtctcgttagggygtgctggagttcttggatgctcttttgtgggtttcctctttttctagctttgtttaatggatttgttggatatttggcaaacctggttgtggcattgtgttatcaacaggcagatgagagtgtcacactttccttatcctgggtaatgtctgtttctgtaggataaaacacttgtcttgtttgtggacagtgtatgttgctgtgtgtgctatactgatgtccctaccaaagttgtaatgggcaggaagactttagtttcttcactggatgtttttgatgattgagactttgtttaaaaaaaaaaacaaaggtgagttgttttcctctcttgcaaagtcacaatggagataagaagcaggtgccagttaaactccactgactcattctgagattaatgtagcagcataatgatgttatttgggtgtttctgcttcttgtaataaaacgaggactagtctgttggaactaatcatatatctacctgtttgtatgttataaaatgtgtaaatagctctaaaagttaaagttgtaatgattcagataactttcatcattgttcattcatttttttccccagtactttttaaggcctagctcattcagagctgtaattcagttctatcttcctatgaacacactgctactgaagtcaatggggttaactatcctacaagcatttgtagtaactaatttaataatactcttttccatgtacaaaatgcggaaaacttgcrccctgcactgtatcagtggttctctcaataagcttatagttgtcttwaaaaaaaaaaagaaatttaaaaggatagaatccttggattctagagttggaagggaacttagaagtcatttaatgcaacacagtaactgatatggcttgaatacctcacagtgaagggaacacacccacacacacccttttaagacagcccattccattctcagacacctcagattttttcttgataagaaagcaataaaagcagtaaaaacatttatgctctacatgccttgctgggtcaggtgtctcccatattgtatttacacagttgcttctttaggcctttagtatagaaccttcaacttattcagcctttcaaaatcttctagaattctgatttttttcatgtcatctgtacattgattaatcgtgtcatgtgtccttatcctgtcattggaacccaggcagtctgcacccagagcccttaccaagttaggcatttactgtaagggatcctcttgtatcacagcagaggttcattgttcttttttttttttttttttctggtgagggggaagtctctgtacgtctgctccttcacttcctaactttggcatgcatgtggcttcagagtgccatgatgctccctccagcccacctgtccrtgatgttccttacttggtgctgagttgactgaccacaaatccacattctctaaaagggatctgactggcctggctggtcaggtgctccatgttgaccctgacacctagggctcaggtactaggccaggccaggagatggaaggagagaccgagtccaagggtgacccaggggaggctctttcagaagggctcacaggcagggatggccaaagaatagctttagtatgtgagacccctccatgtatgtttgtcagctacatagttgtgaatccacattgtttcataatcatggaatcgtgtgtcttcatttataacaatagggcctacacaaaagccttcttgaaatccagatgctgagggttctatttttgaaaagaaagaaaagggatttagtcagtggaggcttactgatccccaccagtcaccacctcccttttaagcagtctgttaatcagctgcacttaatgtttgactagcattggcctcaaactcattggccaatagcattattattcagacttatctaatgtaaaggaccttttttagaggaaacatttctttttggtctttgagaatatattctttgtatgagaaacactgctttcaaaataattaagctcagttccatgtttaactgaattctcagaaatgttcttttaacttctgaattttcagatctttcccaaaaatcctttagaagcagtggatctcattttgtaaatctgtgaactttgaaagcacatctgtagactcccattttaaaaaacagtggtttatgatctttatgatccatcttctttttagaacactgggagagtgcaggtggccctccttatccctgagtttcacgtccatggattcagccaatcatggatcaaaagtattcagaaaaaattccatagagtttcaaaaagcaaaacttcaatttgccacacaccaagtactatgttgaatccatgcaaatgacgtgtaggcattgtgttaggtattataagtaatcgagagatgatttaaaatatacaagaggatgtgtgtaggttatttraaatactacatcactttatataagrtaattgagcatctgcagatttggtaaggggtcttggaaccaatcccccatgcatactgaacgatgactaaattgtcttcatcttttagttcctctctcattcaccatagttcttctctgattagtaacagttcacttaactattttgcaggttctcacagttctgtaggttagaaaataattatatatacctacacatacatatatgtatttactataggctaggaattcatttagagcagttaggtgctgatttttctttttttccctcttaaaataatcccctaccttgtcttttggtttagttcttcgaactaatgttyattctaacctttccagtcttaagatgattatccttgatagacgattgaagcaaagtagatgttggagctgagaagttctgccttttattatctgttaacaacattgtatcatctattctaggcagcaggctcatctcatcaattctttgtgtcccagatgaaagggggaaaaatcgagtggtctctaacgttttttacaacacctttcctccagtctcagatgtctgtgcatctgttaatattcactgttgaacatgtgaacctatctattttcaacctttcctgtgatctttttttaatcttgtgcttgttcaagtacttcctgtgaagcagcagtggtctctaaatacaactccttcaaccctccctgaccacctccccgccttgtcagggccttccacaattactcagcatgtgggtttggacagctgttggggcttctgcactttgtgggtcttgataataaattgaaatgtgccctcctgaaatccagaatacatatctgacatggcctggtattcccctttgacagtcaaaaactctttgatacagttattttttgaagagtatcattactactttaccacttttgcttggattagaatccagtccgtagtgtcagtctgccttgtttcctgtgcatttttagaggtgaacttaatgccactgcaagtcagtggtgctttaagctaattgagacttctaggagatgcttggtagatgtctggtggttgcaacccctcgtttctggtgcagtctgcttctgtgtcaatttttaaacatctatgttggcaaatatactatttaattcttctgtcagataaagttatctgtgggttattcccaaggagatgtcattaaattccttctgtctttcattgttctggttccttttccagttaagcatgaaatggcgttagtaaatgttttattatttccaagcaattcagcatgccgaagatgactattattttaggttaatatccaaggctggctgccaacaagattgactgtttactatgtgtgacgcccaactctaggcatactatagatttccttgtaatactgcttaaggatatcctttcttctgaatgtcaggagtactctttagaatccaccacttagaatttgtagtgctacttcaggggcttgtcgcaatttagcgtgagttcaagaaatgttaagccattactttttttccttttttagacaataactgctgtggtgtgttttacacttgtttatttttaaatcaattccctcaaaggcacttaaagaaacatgtcatttaccatgtctcctaatgacaggtcctgatgacaaaatatattagtggttattaggatagagacaagactataaatttctgggaatttttggatgccttatattgaaatagaaaatttagcaaacatttagtgcacagaagggactttcctgaagggtcattcatgttacttccccatattagagtagcatacttaatagatacttacccatacccttgtgcctgtcccatcctctgtacataagcatgcatagcatttattattattgaactaagcatatagctcaaaagattagtgtcagatgtatgatggtcttttacatagacaatatattcaaaacttttgtaggtatcccttcaaagaagaatggccaaggagagtattttgacacttaagtagcatccaacaaggctgaaggggtagagaaatgtctgaactggaaatactgttgaggtgtaatagaccagcaaaggacagagttaaagggagaggtgaggtcaaatttaattgttgaatgaatgcatgaatctatctatcagtgtcagagctttagatatgggttggactttatcagtttccaaatgttgtcttgcctttggtgctcagtgactctctaaccttgagcaagtctccatatgacaagtgatgtctcctaatcttcatttttagaactcttttaaaaagtgaacccttttgtataatgaaaagctatcaattgttgaaggagataaccatgttttacatgatcaagggtatgtaatgtttgttataactcagatggacttggaggtaatgagctagcatcacagttgcatgaacaagagggtgatggagaagaaggtagggatgtggaaaaccgtttggctattgtgcaagttccttagagttgcaatccacagttgtcccagaacgtgctggactcagagcttgtttagggcagctgttaacatcagaagagatctgatccagcaagtagggcctgttggggaaggttccaggtagcctgcttattcttaagcaggaaaattgcactgtggttccaggtcatcattccatgtygatcagaaaagccagctagcggttgaggtacagggaacagggcttagcttcttgtagaaggctagccagtctgggtagggcatcactgcccacctacattagatgggtgttgggacaggacttggcttccaacagaggactgaaatgattctgtcaagactccataatatataggctgagcatatcctttaagcgggtggagtagctcctggaatcacatgaaacgcttagagaaaggttgaggaggatctaaggcagcttgactaataccacagattcattcctgtctgtgttcagccttttcatctctccagatggcaaattgactgactggcttagcctggactgtgtgctgacttttaagtcaatgaggagcatggagccttgatggagcagtcccctaagactctgggggaggggttctccaaaggaaagcaatgggctgtttccaggagaagcagatgccgagctggaaagagcagattgtccactgcacagagtctgcattaacactcggtacagggatggtgtattaatgcaactgaaaattccatttttcctctggctactgttgtcatgatctagaaatttgagaggtattgctaaatagtttccattttaatttccatgcttttaagggtgtttgatttcttcagtgccatatttgaaaatgtggtttgtaagtctttacctttgaagcacccagtttattgtttccagagtagtggttccttcttttcatgagctctctctctctctctccccctacccgtctctgaacagctgctgtcaggctcacaatcgaacatttgaagtgactgttctgctctaacaatgcagaacatgggatttcaagcctcttttgtcactgcagtaattgcttctgcatttataattaaatgaactatctgtactaagataccactaaaaacaaagtaaatacaaacatcttaattattcagccaagaattgttttgatccagcttaagaagcttatgtgtgtgtgtgtgcgtgtgtgtgtgtgtgtgtgtgtgtgtgtgtgtgtgtgtattaagcccattgctttcctttggagaactcccccttcccccatagtcttaggggactgctccatcaagttaccatgcccctctttgacttaaaagtaagcacatggcccatgctaagccaatcacagtcaatttgccatctggagagatgaaaaggctgaacacagagaggactgaatctgtggtatcttgaactgattccattagtcaagctgccttagatcttcctcaacctttctgtaagcttttcatgtgcttccaggagctgctgcacctgcttaagaagcttacatacatacatacatgtgtatatatatatatatatatatatatatatrtgtgtgtgtgtgtgtgtgtrtgtgtgtatatatatgtatatatgtgtgtatgtatatattcttaagcttctgtatcaaaacaatatatacaaatacatatgtgtgcatatatatattcaggactttcaattattaagcctttgaaaaggatagtggttaatgctaataattccatcttagtagtacctaactttaatcacacctaagttctgcagttgtgcttgtaaagtctctgtctagtttccctgttaatattcttttattagaytctttgactgttgcaagcatgactgcttgtttaatgaccccaacctaagtcaagaaacttgagcagctaatatggtccctttaatgcctaatattggaaaccattgagtgaaaggttatataattgcactctcctaaatatgtttaggaaataatataatagatattctgattccaattacagccttacttataattgcaataaagttgagtctgcaaaaaacttagtggttctataaccgtattaccaggcaacagtgattttgtatcttgttcttgtctccctcctacctaccacccctgcatttctgttgcataaccccatacagatgacaattttgttaaaaaaaaaagtactcaatattaattgaccaaattatatggcaaaatttattattttgctgtctatattgatttacactggtcacaactataaatattatccaaaataagtaaatgttaatacctacattacagtctttaagacttttagttttcccgtatcaagtattttgaaggcgagattaatctgtggggaggatagggtgacgggaactgtttgaatgacaagtattgtgctacattgctaacataatgtcatcctcacattaaccatattttatggatgaggaagctgagactcagatgataaaataatttgcccatgtagaagtgttataatctgaatttgaacatacatctgactacatagcctatttattttctcccatagtatgcctttctgatttcataataaaaataatagctagaatttttgcatatgcatgaggagccaggcactttacacatgcattatttcatgtaatccccacaaactcttgtaagagcgtaggtagctaaaggttaattatcttgtctaaagtaaccagagctcataactggtagacctaaacagtctctctcattcttaggcatgattctttaatgccctccttgattatattctgtattttaaacattattgattaccatgtaataatgagaaaaaggatgcatggtatctaaggattagggttgtttggctgtaaagagaattctattcattaagtggttaattatttgttgtatttacaatcctacaataaagtaatrggcaaaattaatttgaacaatacatgtaacccaacacatccaaaatattgtaaatttagcatgtgatcaaaataaaacattatgggtcagatttttaaaaatcctacatttctttcatgtcttgggcttttgcgtggagtagcacmaggcagtagtactatggagcatcatgcaatcatgaagaggttatatggctcatgccagctctgcctccagagtataatgtatgcatccacttcctttcatctctgtcaccagtctaacccaggactcatcatcttttacctggattatcacagtgtcctcgaaatggtctttctacttaaacctgtcagtgaattcctactgcataaagaatataaattcaggctgttattctcccaatctggccctgcttctttttgttttatgctctgtttactgttagtggccctcatgttcctggaaatgccaagctcattctcccctccagggcttttcctgctattcccccttttgggttgacaactgtcccttatcttcctttatgtgtcatcaaggtctcaactcagcatctccttgagacgtcttctctgaccattcagtgtaaaatagcagcagctatagtagcatcactagcagtgataacaacaacaatgaaaatagctcacattcattactaaactcttactacgtgccaggcattgttctcatatttactcgctgggtccttacaaccaccctttgaggtaagatactgttattagttctattatatgcataatgaaacttaagcacagagacttctgtcaattgttctacaatcacttgtttattttcttcctcattcttaccatgttctgtaattatctttttcttctctagaaaataagtccctgagaaagaggaccttatcttatttcctgctatttctataacatttttaaaatgcccaaaacatagtagattcttaagtatgttgaatgaatgaataagcaaatgaatgaacaacaggtcttattagatcatgatatttcggatgaaaaatggaatatttcagaaatgatacttctctcatatgagcaggtcagaagcctttcacttatactattgagcattttcctctgttacattgtactgtgtgcatataagcatgtgatgatgaatctgggcagatgaagaaaggaagactctgtgtcgtcattctcagcaacccagtagtcactgatcagtaggtgccaggtagttgttggcaactgattatagtcactgcttagcttttcaaatatggatgttgagttaccatcacaaagcaccatttcacttcgtgactgagttttggctgcagattaaggaaggcaactgttgctgtgaaacatctcaataaaggctcaagaagggaaattttttttactttgtttttcagaattttcctgctcttctgaacaaaactattgatttcttttctgcctgctgctcagcagatattaatttcacagaattttagagctgagagtaactgtcagattattagcctagcctggcttccccattttacaaaggaagagaataacccccagggatgaagtggtttgtgcagggtcatgtgggtaattggtagaagaacttgagctcacctcacagcccctaagtgggttaagtgatgaaacactgttcggggaagatgagcacttgctcacttcagagtcataattaggatagtgacccaccagcatcctttgttttcttgacaaataaaattattgctggaagctaaaatagtcaccagaaggatgttgcttgtatatttttatttggtaatacaaagtaatcttattaacatattcagtagttaaaagttacatgtgactattccctatactgaaattcttggtccttctgaagtttagaaatagcatttggccattttacgaccaagaatgcaaaatttggcctcttagagtctctggtttaaaatatgcatagcaaatactggataattttattattgcttgagataaaccacaattcagaaaacaaaattgcttttctgctggcagggggaataggaatcaagcagaatattacagacattatttggcataaataaggaaaagtcttttccttgctcatttcaataaaagctagaccagattcatttttctgggaactggtttgattctgaccgtttttaagaagttacagaccttggagaacacaatgttgaaagaagctaagatttcccagaagctgctatacaartgtgctttcatacatagaaaaggatccttgctcagttccattcctcaaagtgataggtgtatgaatttgcctgccaatttgctctgtgaaacttaatttaagaagactaataatgccattagtggatgtcaaatgtctgagcaccaaggacattggggtgaatgcctgagttagtctcttggagaatcgaaaatgtgaggaaggcgcatatatctggtgttactatcatcatttactttgtgtgtctgtacttgtgggccattttgagatgtctccaacaacttggaaatttgcgaattgagtataccttctcgtttctttctaagactaacatatacaggagcaaagtcacctgcaagggggctagattggttcctaggcctacaggatttggtaatcccattggaagattaaatatcaatttgtgttcgaaggtggaaatgggtatggagatggtcaaggaaggggtaagtcatggggttaaacattatcagcactcttctcagctctgcagaagggaatagaagcattagccaacagacttgaagtatcatggcctcattgtcaagatattgcaacaaacttttaagaggttggtcctacagatgcatctacccctttagcaggattggttgcatcaggctgtacttccctaatgctatgagagtctcagttcacctaaccactggtgggtgggttactttggtcatttaacttctacacaggccaatctgggagagttgaattgattatggaacttcagttactctagttcctgtggcaattacttctcatcataaatttactaattgttgtttggacatcagtcctacaggcttgggcaacatatgtctacttgaaagagatctgtttctagtatattactaatctggttttgctcacttgttaattcatcaggctttgagggcttactatgaaccagaggtataataggtaacttaccatgtaacaagggaagcaggtgaattgtcagttacaccacaaggtagagaattaccaccccaaaacattcttcaacctctaacccagaagccgcctcccatttttatgaggctcagcctatgactgtatcattattcaccctgttagctctttaagtataatagacatttacaatatctattacatttattgtaatacaaattacatgtattgtaatctattacaatattaggtgttttaagtacattgcatacatattccttcatttactaccaactattccaggacatgaacacagaatacttctctttgacagattaggaaactgaagcctagtgaaagtaagtaactatctaaggtcatgttttattcttggctttgccatttaccaaatactgttcattcgactatacttaatayggagttcaaacccattgcatggtgggcttcagagttcagtctgaacccagagaaaatgggtggggcactgagtggatctcagaagcagtctgttgaatgtcttgaagtccatttccrttaaataggtgagtattgtatgtcctctttgcacaagattgtgctaggaaaagctgagagagataccaaagagcatgattaagatgcgtttctttctctcagtaaagttcacctttagcatgactttacagacaaagaaggcttctgaaggcctgacctaccaggaagactcagaactgttaccagatcaagaacggcactcgccttccccttgctttctgtgaggggatgacataaaagcgtcagagttttcagtagtccttaggagttcagacaggtggattaaaagctactagtaaattttaatgacttatgtgaacgaaccctctaaattattaaacagcaagggacatgggttccttccttaaaacgaggaatagaactccatgtataagaaggaataccatcttagtttgaccctctttggggcagggtggtaaaggattctcctattttgattgcctttgtcaccattctaatagctcagcttaggcattgcccaggtatgcacatgtagctctttatgtggttattatagctgatgaaggtggtgatatgcagaggaaataaaaaaatgaaatcataaaatagaattatctggtgcatattgaataactttcaattttgaatgtagcaaatgtgttttcacctttaacccagagctgtgagatcaaaattgctacctaccttcctcaaagtgttggttcattaatcaaatggaagagtccgtttctctttacatggaaagagtctggattgacaggttacttacgttaagtccagacctaagttgcccatttctgcaatgtaagatgattgcattgaagagtttaattataatggttacaaactctcacttccaaattagcaaaaatgctagtctttttcccaggtaccttcatcagaatattcctgaggatctctgaggtcaagtatgttcactgagatatttctgagaacctctgaggttgctgtgcctgtttactgctagcttgctgtcacctgctaggagtaaacagaattggatacataacagaaggtgatacctgcaatctctggccttcaaacattctgggagtgggcttcaggtgcctgatggctctccatgtcactgctgaggagacaggggagaggtgcctaccagctccactggctgagagcctcactccctgctttcagtgcagatctcccttcctcagtatcacacctggtcagggcacaacagagcsaagcgttctgcatacattcagcttcatgtacaatatctttccaaagcttttctgtaatgcctgggtaaagaaagcctatgttgtctgtgaaatcctgtgctcagagccatccagtctcttcgatggtcctacccctggcaacagtttacagtttagattttccccttcattttggtgagttttctctttaaagatcccttattatctgacctaggttgggcccctactaatccattaggattgttttaattactctgattcccacataagggatggggttaattccagtccctttagttcaaggaaaatcctttgccccacagaaattcttgaatacaagttaatatctgagggggagatgcagtatccaattgctttcagtggatagcaatatccagtgctctcccagcagcgtttgagacctcaatgtaagtaggtgtgtctggatggagtaacacccagttcctcagctaaggacatccaagggcggggccctcaaaagtcccattacataaagtagatacaacactcaaaagtccattatataaagtaaatacaacacaacctgagaacatcagctcagagtggagtgaagagctggtttttttgaggctctctctctaatccagaggcggggaacagcacactctggtcttcatgctaccacgaaggaagacctaataaaggactcaattttttttaaagattgatctccctctattcaataacccatgtgtgaaatttcaattatacaaaactagagggaaaagtatgtgtttagaacatggtgtagggaaacactgtgagcaaagctgctgattgggtctgaaactgcaaaatgggtgtgacagaatctactcggagccatgtgacctccagggtgataaggatacaatgtgcctctcaccctgtgcccctcctacttggaaagctttcagtggttggctgccaagcagagcgcagggtcctctgggacctggcctgygtgcttcctcagcgtggtttctcgtccgccttctgtctgtgctccagcagcactgccctgtttgctctcccctgcacacatgacaccgtttctcacaccccagtccctgtgctcatgcttctcacctttgtagaacacctcagtgattttctggtttcatactataacaaaccccacaggccagcttttcacatagttgttaccagcacttggccaacagttgttttttcatcagtgggtggagcagcttttcttgcccccaaaaaacagtcaaccactcatttttcattgggtatatgtattcggcaaacattgggtacctgctgtttgttggcactggtgttgagaagatgaataacacaccctctatggccctagggagttcccattctggtagggggaacctgactcaggcagcaacaaaaccttctggtaagtgttttgctgaagagtggggaggttcagagggctgtggaaacccaaagacrttttacctaacttgaacatcatagaacacttcagaagaaaccacatgtcagcaggtcttatgggaggagttggcattggctaggcagaaaagagaagaaaaatgggttttggagatacagtactgttgtcacccctttgatttttcactagaagacacaaaaagctgtttaaaatactatctgttgatattctgttctagaacttgtatgtattttttaaagtgtttgtcaacattgcaacaaagtacccagttgaatgtatcctgttgtttcaatgattatgagatgacttgaagtgctcttgagaaatttaaagttcgtttgtgaacatgaattctaactggagaaaaaaataggtkatgatagtgagttggatcattgttgcagttctctatttaaaccttactatttatcttttcttctgtcttcatctgggaaaaaacccagaaaagtattaaatgcatatgcttwaatttttgactatattttaaattaccttgttagttttacctaaaactgtaatttaaaccagtttaaaattaaggtttacttctgggcatctttttatatagtggaaggaaagaagttgaacacttacgggggaaatggaaagttgatgttatgtcttgtttttgatatggctcagtttttacatgactgttaaatgctgccctttaaatctagtagaaatgttaaatatggggatgttactttttattataaaagaaacaacagttaaggggaagcaagtagcttttaacagatttcatattctagactagttatgaaatctgtttttggtctggacaataaaacatttcttgtacaataagaagatctctttttaaggttatgagaagacagatgatgtttcagagaagacctcactggctgaccaggaggaagtaaggactattttcatcaaccagccccagctracaaaattctgcaataaccatgtcaggtaagaactaccaaagaatgccatgagaccagccagcagagcagagctggttaggtcaaaatgaaaatgcttgcaaagagctttcagtgcagtcagttaatatttgagagctccctgttggcmgtgtgaataggctgtttccccatcttctctcccatagagaaatattcataagratctggaaatagcgaggagcagaaagaataagcacccatcctstgccratgctgcatagatattgaataatgaaagctgcttatgtgtaaatgcctctgtcctaaacctgttaatagagcgatgcgttactggttttggttagcaagttttaacattttagaagaggtctttgcaattctgcaccaakaattccttctggttatatagtctttaagtattggtttttgatagttgtgaagtttagtatggtgtggaggaatggagggctgtgygaattacttcactgcactgttgtgttttcattccaacaataatgtaaaaagtatctgtgtaagcactggccacttatgcggcttctgggaccacataaacaccttcaataccaataaagtgtttctccagtggcagagttaactagatttgagaagtgcccacttaatatgtacaatttcaaattctagaggaacatttctcaatttgggtaatgtggcatgtgtctgctttaatctcctttctatttgataaacaagaggaagatctgggtgtttctaagacctaagtagtgatatcttactgatgtgggcatatctggtgtgtttagtgtggatttctagccatgttcctggagtggcagtgaagaaaattcaaacagaaccccagagatctccctgaaattatccaggaaaggcatctctgtttacagtgtctggtcaaattgctcaaattgctgatttcggggttcttttggcaagattttattttctagtcacacgttgtactctgtcttatggagggctggagccctttaactccaaagttgctcttctttgtaagctacttctagtaatgttaagcagaataattggccaaataggacaaaagattatgcaaaaaaaaaaaaatctgtggtattcatgctttaccatttatttaaccttttcactctttttcatttaggttaatgaccctttgcaatattctcccaatttgaaacagccrgcaaatgttccttatctaactttttatatgktagtaacagaactttgtaagtgtgggtgctaattatggagaagttttatgctacttttcatttttgttttctagcactgcaaaatacaacataatcacattccttccaagatttctctactctcagttcagaagagctgctaattcattttttctctttattgcactgctgcaggtaaagtcacgtcataaaaccttgtcaaatgttcaggtactaataaatgttaagcccgtgaccaatcccctgaggtttatgtaaatgccgagagataagctggttttggtggacatttctggctcctgctgcaagcagtgttggaatccactaccttttccagccttttgattcatttttatcagcttattttgggtgttctataaatttgatgtggcaaggactgttcattttgsgtggtraaggggatgggacgttttcttaaaatgytaattttcatagtaaaagtatcaactctgaaccttagaatgcaagaagttaaatcttgtgcttctctttgtatttaaattagttgtagtcagaaaaagttttagtttattaaaaagtagcatattgaacatatgcttaaatttgaaaaaatattttcattgaacttgaaaataaaaaatttttaaaacaccacaaaacacaaggaaaaaaatttaaaactctcattattctaccatcagagacaactactcttaaattgtgggtatatatccttctggtctttttttttttttttttcctcccaagcatcgtttattgacttcgtttacaaaaaggggatcatagaatacctattgttttgttacctgctgtattcatataacaatgtatggatattttcccagttattcattgtgtttctaaaatatcattttaatagttatattttaatgaatagatatactgtaacttatgtaaccagtcttccaatggaggttgtagtcctatatacaactgcttactgtgaaactaattaacatgcttttccagtacttattagatacgaacacattacctcactcagcattagtcggccaagatagtaaaatcagtgaggcatattttagaaggcactgagactgttttcttgaatctattataaattttctagttctcattggatttctcttttttttttttttccaaacagcaaatacctgatgtgtcaccaacaggtcgttatacaacactggttcctctcttatttattttagctgtggcagctatcaaagagataatagaagatattgtaagtattctattttttcataattgtatgtgactttgttatttatatatgctttaaatattagttttttcttaaattatttaattcttggcgtgggctgtttaaaatatccattcaacttcaaaatgtctagaatatgttcctatccctgaagttgatttttgttttctgtaatattgctgaatgtttgttacagtgttctattgcatttatagtttagcaaataaaagaaattaatttactgtaataattggcttgaggagaaaagtacatttgaacattattttcaattaaatgaaaaaccctccaaattatctaagtgatattttttggtattttctattttttaatttaaataattataaatttcattttattaaatgccttggatttcttctcaccttatttaatagttctaagtttctttttcctttatctcatttttttaaaagaaagtaatagtaaccaaattagctatttttattctgtggtaataagagaaaggggaagtctctttctcctttataaaactaactctaccaaataaattcaggccttttttctgttatatctattttaactgtcttacttgaggaaaccaatgttttgttttggtttggtttttttcctgttcttttaaactacttcatatatatatagagagagagaaggagagacttttaagttcaggggtacatgtgcagggttgttacataggtaaacgtgtgtcatggggttttattgtacagattatttcatcacccaggcattaaaccgagcatctattagttacttttagttatttttcctgatcctctccctcctcccaccctccaccctccaatgygcctcagtatgtggtgttcccctctgtgtccgtgtgttctcatcatttactcccatttacaagtgagaacacacggtatttggttttctgttcctgtgttagtttgctaaggataatggcctccatccagctccattcatgtccctgcaaaggacatgatctcgttcttttttatggctgcatagtattccgtggtgtatatgtaccgcgttttgtttatccagtctatcattgatgggcatttaggttgatttcatgtctttgctattgtgaatagggctgaaatgaacatacatatgcatatgtctttataatagaatgatttatattcctttgggtatatacccagtaatgggattgctgggtcaagtggtatttgtctttaggtctttgaggaatcaccacactgtcttccacaatggtcaaaactaatttacactcccaccaacagtgtataaatgttcctttttctctacaaccttgccagcatctgttattttttaactttttaataaatgccattgtgactggtataagatggcatctcattgtggttttggtttgcatttctctaataattggtgatgttgagctttttttcaacgtttgctggccgcatgtatgtcttcctttgagaagtgtccattcatgtcctttgcccacctttttttttttttttgagacagagtttcgctcttatcacccaggctggagtgcagtggtgcgatctcggctcactgcaacctccacctcccaggttcaagcgattctcctgcctcagcctcctgagtagctggaattacaggcatgcgccaccatgcccagctaattttgtattattagtactgacagggtttcttcatgttggtcaggctggtctcgaactcccgacctcaggcaatccacctgccacgtcctcccaaagtgctgggattacaggcgtgagccactgcacccrgcccttttcccactttttaatggggttgttttcttcttgtaaatttaagttccttgtagatgccggatattagacctttgtcagatgcrtagtttgcaagtgttttcccccattctgtaagttgtctgtttactctgttgtttttttttcttttttgctgtgcaaaagctctttaattagatccaatttgtcaatttttgcttttgttgcaattgcttctggcatctttgtcatgaaatctttgcccatgcctatgtcctgaatrgtagtgcctaggttttcttccagggtttttatagtttggggttttatatttaagtctttttttgtgtttgttttttttgtttttgagatggattatcactctgttgcccaggctggagtgcagtggcgcaatcttggctcactgcaacctctgcctcctgggttcaagcgattctcccacctcagcctcccragtagctgggattacaggctcccaccaccattcccggctaattttttttttttttttcctagtagagacagggttttgccatgttggccaggctggtcttgaacttctgacctcaggtgatccacccaccttggcctcccaaaatgctgggattacaggcgtgagccaccatgcccagccttcatttaagtctttaatccatcttgagatgagttttgtatatgatgtagtttcagtcttctacatatggctaaccagttattccagcattatttatcgaatagggactcctttcytcattgcttgtttttgtcagctttgtcgaagatcagatggttgtaggtgtgcagtcttatttctgggttctctattctgttccattggtctatgtgtgttctcctactagtaccatgytattgtggttactgtagccctgtagtrtagtttgaagttgggtagcataattgatacctccagctttgttctttttgcttagaattgccttggctatttgrgctgtctttttggttccatatgaatttttaaatagttaaattttaaactattcattgacattctgtaaagaatggtagtttaatgggaatagcattgaatctgtaaattgctttgagctgtatggctatttttacaatattgattcttctatccagcagcatggaatgttttccatttgttttgtcatctctgatttcattgagcagtggtttgtagttttccttgtagagatctttcacctccctagttagctgtattcctaggtattttattctaaaatagttgtttgccagtctgagaggacaatctgttaatccttaggaaagtaagatggtaaagccaggaaatggtgagaaatttagaacgcyccaatttaaagttatacaaacattaacactttttctatagaggatcaaattgggatctcattaagatggcatttgccatgttaggaatgggtcaattgaacatttagatcatcagtttcaaaatcatccaagtatttaagagtagaaacagatgttgtgcatgtgtataaaacagcatagtcttcttgattggaaatgacatacttgatggagacactagctgagaagtgtaagagactcctacctgcattgctccacatagacttgccaacctttaaattgtggtaggacttggcagtccacagggattggtctttactacacttttgtcactttctttgccttttggacttcccttttctttgtttagcctaattatcattgagtacctttaatttactaggcatcatgctagtgtttcacaaatgtttttctcgtttaattttttcaataacattgaaagttggatgttaacccaattttaaaggtaaggaagctgaggcttagagaggtcatgtaacttgtctaagaaagtgatagaatcagaattccgtcctatccagtgctcttggctctgcatgattgtgaagagtcaccaacatttattgtgcttctaggttgtacttactctatgtcctttacatttactaaatcttataacaacccttgaagatgttattgatcttatccctattttacagataagaggaggcaggaggggtacggtaacttgtccaaagtcacactggggctgtcagaatccaaacaaggcattttggctccagactcctgccttataatcactactcaaaactgccttccctgtcttgttttgctttgttttgttccctggcaaagctataatctctctagctatggtttctagtactccatctttgaaagtacgtggcaaataaaattgtatccaagaagtttttttttaacagaactctttttggcataatataataatcaggtactattagaaagttgctaatcatgcagtcctaaagaatgtaataatagtattgtgagataatagtatcatatgaagtagttttccaatgaaatcactgttaagaaattgactagaaattgtaagagtagtttagcaagaagtttatgccaaactgtaaagtgatagaaagtttgaaagaatactctctaaaatgggggacaaatcaaataacaatttagatagttggacaaagagctgtctttatyagtgagaataatgaatacatcttttcattcatccrttcagcaagaacatttgaagaactcttgagctgccaggcattcattaggatatgtatgaggatgtgttaaacttttgctgtgctggtaatcatgtctcatatgtcagtggcttaatatataagtttatttttcacttactcaaagacasgtgatggtgggcatcagggattcagcctgaatcaagattctgctttgtggaatataggtggttattgtagcaagggtggggagaggggatggaatctcagttcttctatgttttggcccagaaatggagcacgcatctctttatagctcaatattagaactagtggcatggcaaagagaaggtgttatctcagggtccatggaagtggagagctggatattggtgaagactggtcatggctgccactaatacatcagtgaataaagcagagattacaatctagtaaactttcctatattctattagataatgtttttaaatctctctatatatatagatttaaaattttaaaatatatatatatatatgtgtagatagatagattaaaatatagtaagaattgcctgcaggtaaggtactgaagacttatccacccccagtgcattttaactcttgatgctttagataacttaacatactatgattttctatttttatgtgttaataacaaataacacacatacttggaaatactctaaaattgatggagaactctcttctaaaaagctgtattatgctaaatgctagttcctgtgataaagatcaaatttgttaaattgatatttaccactaaaaatgttccctctttgctataaacttgttaatttaaatactaggagactccattcgttataaaacagttattcaaagcctacaatgygtaggaaccaaatactgagactatgttagtgagtaaaactagccgtgatggagcttatatccaatagaagagatcgacactaatcaagtaatcatactggtgagaatggcttgaaccctggaggcagaggttgcaatgagccgagatcccactacggcactccagcctggacgacagaatgagactccatctcaaaaaaaaaacaaaaaaatcacactaggctattaatgagaattaaatgatggacgtgaagtccttagaatagtgcctggtatatagtaagtgatgaataaatgttaactgtattatcatctagagatccttttggcttaacagtagaaaatggattgcaaggaaaacagagcatttgtgcagacaagaatattctagttgttagtgtaaaaaaaatgaagatatattagactcagcaggtatggtagacatggtgaaaagtaagaaaatgaatttagtacatttttaagagtaaaactgacaagacttaccactatctaacatggctacataccctattctatccacaaccactggaatgtaagctccatgcaaggaaggggttttgtcacttgttactgtagtctcagcaacagtaacagggcctggcacatagtcagtgtttagtaaatatttattgagtgaaagaatggcttggataggaatgagagggagacaaaggtattagaatgaatttcctggtttgggtaratggatggcatgtgtttccatgtctgagacaagtaccaggtmttggagattaaggtccctggttgccttgtgaacagtttgagatgcctttgagattgccrgagagatgttaaagaggcaaccagatataatcgtggagctcagatgagagttttgactggtatatatttatgtactggttataattgaaactgcaggtatgaaagagttgtaagaagagaatatggagttagaagtgaggagggccagggagtaagccttgagcaataccattgctgaatagcaagtaggcagaggagacaagggtcaaggtgcagatggcaaacctggcaatgatgtgataagaaatacctagggagggaagagtttccagaaggagggagtggtcagcattgcatactatgtatcctgaagttcataacactgtttatacaatacagtttattcgtgtgctgtcaatctaatactgatgatattaaataattcattagccctcagtgatagtaaatgaatttggattatgacacagttgaggtatttgaactcagagaatagcttaattttttatgaactattagttttagaaggaataatcttatcaagacacaaaagttagatgctttctttttgtaggcatgggattaaaatctgcctattgagatagattcttaatatattcaacacacttgtttcatgacaagtaacctaattctgtgatgggaagatagaggaaagagatgctcttgtgcaagagttcgctgtagatggaaagtgatgtttaagatcgccttgggtttcactaagattaaatttcctctttgaagtggaatgtttcattaattagcttttatttatctcctttagttggaaatctaaccattgtctcgtattttggaaacatttgtgcctcctttgaatatctaaatttaccttggactgttatttttgatgaaaatttgttttggatcactttctaattttcttctaatctctactaacaagcaaaaagaatattttcaaagttctgtaactacaaaatctctactgatgctacaaatttaacagaactttaaacatttaagaatcttttttggcaaactgtgcttgcttttggaagcaataatatgcctattgaaagtctacattaatacacttttattagtgagtattttatactgaaaaggagttctgattgtgttcctgcatgtctgtgtgggaagaatcattctcaacaattctttcgcagaggcattttgaatgttttgtttgcattttgtgcagttcagtagctgattgtttccacaractgagtgtatgctgccagctcttrtctattcctcttgggtgttgccatgtcctggagtgctaatccacacttctagatttttctcttgcagtgttttcatatgcrcactgtgattctgaaaactgtattttttctcaaatggaaaacttaggaactcatttgttttacatttgttccaacccatattatagtcaggtacgcacaactatattcaacttcaggctttgtatgatacratctttgagcgaacagagttagttacactcaccgctcttctgcagtgttaatrgagtctgatgagttacactcgatgctgtaaatttagatggaagccatggaaaacctctaggtgaaccggagagaaaatagctttcctgggcactcagattctcacctttcctctgaccttctgtttcttcttcttacscactgctataaaaccttggcttatgcaactcttcaaacctacctagacttagactaactcacttgcttattgtgtaattttgtaggtgctcttgggaggaaggaagatatgataagattatgtaattcaatggctttcggttgcaagtggtgggaggagggaatgctggggagcattgaacaggggagactgtatgccagtggtagacatcgttggttcaagtcattggccgacatcagcatatcattaaattatagaggatgtgctcagcttaattyggtaacaaatttcgtaagctgaaaatatttcaatactattattraacagtagttattatagataattctctcaggcaatctcctttttraagtgagttattaaagcaaaatactaaatcaacctttcatacttttctagtacattaaaattttaatcctacctatgtgccgaggtaagatccttgtgaggaccacaaacttatgctctcagaagaggagcactctatggagatactgggaattgttctttcagttttaaaattcctaggtgtgctctaattcttcccatcaccactcctccatcaatgtatactttaacattgacatgaatgagaaatgataaaaaccttgagaaacataagctaaatcttttttggtatgagtgctctcttgttktagtaatctyattcacattttcacagttgttctttttgcttttaaactttagaaacgacataaagctgataatgcagtgaacaagaaacaaacgcaaggtaggaattttacatgcttttttctcatatttgtcaaacctacttgtagtatatacaaacacttcaattacatataattcaattgcaaatagtgtgcatctcaagtttttgtttyggggtagattgatttttgctttgtggcatttgttaggatgacacttaaactcactttaaagtgatttatagtgataatacttttgaaagccaacattttaaatatatttaagtgcttcatagcaatagtctctcaaatacagtccataaagtctgcagttgttttgacagtgttaaatattataaatttattttgtttgtaatctacagatgttattctagaaaagatgtatagaaaataatcacatgtgatgtcacttgagtgaaaagcattttggaaacactgagttatacatgcagatgacagacactccagaaataaaacaaatacaacccggcctgcttctgtacagtgcatggcattttggcacagctctttttggatggggctcattttgatacagccaaaagcaaaatgatcttcaatacaagcaaattcgccatcatgctctaagattttttttttttaatgcccaggaatgtgagaaacagacatcttagctcatctctgaatgaatttgccccatctgagaatctcatctctgaagttctctgatgtggtgaggataagtgatgtctgccaacattatctggtatttaggaagactatttttatactgctgatatttctatggagtcctgtcaaaattccctgcttctttttcaccacctcccacaataggcattatatgccaatttttaatacatttaaggatgatatatttactaattaataaatttgcaaaatatttactgagagtattttattatggaacatataagaaagtataagacgggaatttcaacttacaacttataaagagcttataacatatttgttgaaataggtacatgtaaaaacatgtaaaagtacaaagagatgatctgtgtggaagatgaaggatttggactacatgatctcaattatcttcggatttttgtggcaaatcatagtttctrtgtcaagtgctataaaaattggtaaggagagaaaactstggtgtatcttgagctagaccttgaattttaggaggacattggatgaacagagaggaatggagaagatatttttatgtgtgggttgagtgggaaaggaggaagaggggtttttcaggaaaataagactgtaggactcctttgctgaaccattattagactgccagrcgcagaaaggagattcacatcagagggaaacaaaatcatgatttaaaaggtaggctgaggttgaattgtatagggtcttgaaggctaagccaaggggattccaatatttcttgtggatattgagtcgctgttgaaggtttatgagccaaaacgagacaggccgaacatgtgggttaaagatggaaggcagaatgaacaggagtaagggactgttagaagcctgggacagagctactccaggagtttagttgtgaagggacaaacacaggaattgaaagggaaaaaatccagacgtttcaagcctggtatttttggcaatatgcagtttttgcatttgttgccgtattgctcagaatattcagtaacagcttttgaaacagaagtacataaatgcttttccaacccataatgtatcttgtagcagagggctcctatgttcagtgactggcaattattgattttcaagccttggctcaagaagttgacatagtacagtagaggtgtggtcaccatagctatgatgattttgggctaccacacaggtgctccacccttctgggtacgtacttacctccaaaaaaaaaattccttgcctaccattcagataaaattttatttcttgactatccatcttggttcatgagtccccttcatagataacaggattggccctatggctaaatatgagaataggcaagtgagaggaaaagcttctataataaatatatataaaactcaattcaaaaatgaaatattagggcttagctataaaagccatttcagtcaacagaatacacttcatatctgtaggtttctcatcctaagattcaaccaattgaagatcaaaaatagaaggaaaaaaaaaaaatgaggccaggcggggcggctcatgcctgtaattccagccctttgggaggctgaggcggatggatcgccagaggtcaggagttcaagcccagcctgaccaacatggcaaaaccccatctctactaaaaatacaaaaattagttgggcgtggtggcaggcgcctgtaatcccagctattcgggaggctgaggtaggagaatcgctcaaacccaggaggcggaggttgcagtgagccaagaccgcgccactgcactccagcctgggtgacagagagagactctatcttaaaaaaaagaaaaacaatgcaacaataaaaaaaaatacaagtttaaaaatatagtataacaactatttacatagctatttacatatttactatttaaattgtattaggtcttataagtaatgtagagatgatttaaagtatatgaaaggacatgcataggttatatgcaaatactgcaccagtttatttaagggacttgagcatccatggatttgtatccatgggaggtcctggaactaatccctcatggatattgaggggggactgtactttstttcagatcttataagtcccatatccaagaaattatggcttttatgttggtagttgaatttgtttcctaagagaatagtrtatttttgttttcccctttgctgcctttgagtattggtcttcttggtttggcagttgataggagataacaaaaatgttcgagtaggatactgtttgctstcagataattcagattgcttaacatgaaagccatctgttattaggccagaatgaaattcaatttgcttttctgaattgaggcagaagtgggtgtataggagtggggagggaggagtatttttgacaggtaattaatttttgatggacatctgaagcatccaactcattttcattttgtcagtgtttgtcaagtccacataatatgtaagagacatttttttctcaatcaaatgttaacccttttatattcacagaggaatgaatattttctctccttatgtgaggcatcagagggtaacactctcattccttagcaacttcagaaatataaacttgtctttttatttccaacattttcaaccgtttaactgaaaactggtgcttattggatgccctgttttcactgataagttaactcaatcagggatcgaattatggagctgagacctaactcagaacctaaaagttgtcaacaccacttctggaaacaagccttgccccagagatatataagctggtttggttgatgattcagtgacctgatgaatataaaattgtgtactgttttccaacaacctagctgcagagagaagacagagtaggttgacgctcagaagtccagggatgtgagtgagtcttgatgagttttatggtccactccacccagagcactgtggctgcttctctttgctccagtgtttttgttgtgtgatggtttgtgcatactagataggaacactacagagggaaggtccaactcttactcagctttgtgttcccaatagctcccagaccaggatcctgtcttagtaggtgctctctgtgtgcatgttaaatgaacgagtaaatgaaccactctccagataaatacttcagtatacataataaaggaagaagaaagactggaaatgaaaagaagccttcctgaaaattcattatctggagtgcgaataagatgaaaagcagtatcttcataacactgtgtcccagactttcacagtcactgataaaatccaaatatggcagaagttcttgccactttatcttctctgtcaaagtcattatattatcatttaacccttgcttcaccttctgtcaatacaatagtttgtctactgatccctttcattactcaaagcactgccctgttcagaatgcgctcrttttccttgtatctaaccttactttcatttcctctgatctcttccctcagtatttgaactcacattttggcacagcctcctccatgtgtctacacacacaagaggccatctctcattgttttctctgagatgagttgktctgccaaatatatctttgcagaaatttataaattacaaatttataattgttattctaatatgcacattgaagccagtccccatatgaatttattgtggtgattgagctagtttttattttaactggtaaaaatatgctgtcgttttttatgaaatgccatgatggctagcttgtcaatatttcaagtggaatgacaacttcatctaaaatcacaacatgggggcctrggaaaggatggatggagttcaggtgcaaactaaggtatttgggaaaatttgtaaatgcttcctaatgagtaaatttgctttttaaarccccaggtgtattccctggacgatggtctgtatacattctgcatatgagaatgtgtgggagatagagctgcgatccttagcagcccattgatcaactggtttgatgctatagttaaatgaaggctaaattgtttaatatcgtaccctattttattatgatactaagcattagaataagtaataaagcagttttctgattatttagaaagggtcacatgaaattcttttaaactagacacatagctaaaaataataaatcgactcatattcaccttatcttccttccccagagctacatcaatcagccttttctgaatggagttgagtgagtgacagctgatagccactaacaagactacttccctgcagggcgcatagttgcttatctcccactggaaaccatttcagctttaaagtcctttgtgaaaaaggtgttgagttgatgtggattgaatgtgttgcgggttgttaagcatgaaatgacctactaacaacaaggcggagttcatctggttcaattcatttcagtgctgttcaaagagatgtattatgctaagggacttaaaatagcaacacctttcttgcctgctgaaaaagagagtgttgctccctttttgtctctctggaggtacccccacatctgctctgttcggtagacctgaacatatattctgccacgtgtatgttggcttacctataaatggtttttagaaagtagygtttcagtgatcctagggactkaaaattaagcatatttatggcctaagtaatttcagacatctataagctttataatattttcagattgtcacaaagatctgagtattatgcaaatactaaaatctaaccattgaactggttagatgtcttcagcagtagctctggatggagaggagatatttgtggggaaagacagctccaggttgtctttcacttttttttttttttttgcacacaaaggagcaaaacccattgaggaaatttgggaagatggttaaagtgagaggactgattttatggctggctttatgactttgctctgtgctttattcgtgtatgtgcatactccactcacattgtcttttatttttaaatttaaaccaggtagtctgctttcatgggaatttttctctctcctgtttttgccaaacccaaataagttatattaacatattttctgggaaaaatgggtgtgattcaaagttagaacatttgttattttacttcagaaagtctttattgaacatctttcttgtgtaggaccctgtgtagaaaatgcaaagagaaatcatacttgtcctacaggaaattataatcttgtcgggaagataagatgcagactgatataattcaaggtaaaaaaaaaaaaaaaattaagggccaaatgagagatgtagggattccaaaatgccatttgaggggttcatgaagtaagagtggaactttggtaagcagatatcagggtagtaactgtgagtgatgcagggtgaaaggactaatatgagcrttactgtggaagtgggaagacatgagatgtactctggaaatagcaaatagtctgttttggccagggcatagaatccatgtcatgaaacaatgagggacagggacagggaggcaagttagggtcatttttcggagtcttttgaaaaccagggtgaggaacttggatggaattctgaaaagtatggataggcttccacttgtgcttttgaaagaatttgacagctgtatggagaggtggcaaggagaggcacagagagattgattttcttattaaggagggggacaggttgtgtcaagtagaagacaaaggaaagcacacagtggatagattcaactggacctggcaatggagagaaacccagtcaaataccaagtgctgccaaatcaaaagaccaggactgagacacccactaaatccagcatttaaaagaagtagccgttgttcatttttcttaactagagagtagtcgtggagctctgaaaacygaagccagatcgcaaggagttgtggaatgactgatgggtgaggcagtggagggagatttttctttcaaggaatttctcaattaagcagaggaaaaagtgagggactcatgactgtgagcaggaraaagggaaagcatttcgagaatagggtattgctggtctttgtgctccgatcacatcgtgccacttatattgatgtttaataagccattggttctcaaatttggcatcagaatcccctggagcatttgttaaaacacagatwgctgggactcacacctagagtttctgtaggcctggagtggggccccagagtttcarttttaacctctcagtgacactgctggtgagggggtcgtgcttttaggacaactcatttaaaggttgtataaatgagttgatagaagtagtatcaaccaatttgacatcaatatatgtattattatgtgtattacatgattgaaagaggaatccaggaagtttccattgtcttttgtgtcagtggacactaatggttcagccaagcccctggtggtttaatgtaacctttataggcaagcttatacaagagactcttcctgtgccatgtcagtttgtgccacactgaggcttttgccttaaagttgtctttggaagtaagagtctatatagtgaataaaataatattttaatgttggcatattggctttccttctttgccccagtcaaagccatagtctcagctatactacagtccttgatgacctaaaattcctcttaaatgctgactcagaggaattggagcacactacattttctgtggttttactattcctctatgacaacagtagtgtcattgtctttttggatgacttgcctcttgttacccacttaagaaatgataggctgggtgcggtggctgacgcctgtaatcccagcactttgggaggccaaggcaggcagatcacaaggtcaggagttcaagaccagcctgaccaacatggcgaaaccccatctctactaaaaatacaaaaattagccaggtgtggtggcacgcacctgtaatcccagctactcaggaggctgaggcaggagaattgcttgaacctgagaggtggaggttacagtgagccgagatcgtgccactgcactccaacctgggtgacaaagcgagactctgtctccaaaaaaaaaaaaatgatattattgcccrgggagggcaccccggtgacactttcagcagtggccccagtggtagaccattctgattggggtggggtgggtgggaggcgtgcttctctcagagaagctgatgttagagtgtaagtcagcacctgcacctgtgcattatttgattgggtcctgagaaactggccacttcctccagggcctttgaggaatcccgaatgttctctaacagaatgttttcattcaaaaaagaaacctattacaacaaagctgttaccttgtatcctgctraataaaaacaagttacatttgaggtaattgtttagtctgagctctcccatggcrggactgtcagactaattaagctgttagaaaactatarcaggtgtgtttggttggaactggtagaggagttttgcatttaaarcaatgagctgtcaaagcaccataccactagccattctgacaatcctgtcgtaacttattcctactccccttcaccaggcttctttaatcatctcctctaggctcttaacgctttccatatattgraggaatgtcatcttcctaaatgaaggtagggaggaacacagtcacctccttgttgaaatctaatccagttacattgtgactggtttcttgaacacattctaaatgtacaaaattacattggccttggctgtgtaatgtgaggtttacctaattctctactgaaatgaatacattaaaaaaaaaaaaaaacctgtagaatcagaatagcatctctgttacttttggctcaacaaccctaaatgctcatcacaggctgggcattgtttcttgctttctctaaacttaggtttgtgccgggtcagaggaggttgatgatttaaaaatacctagattgctaattcagtcaccagcataatacatgtggtggtgtttattttcattgttctaaggactgggtgtttaagaaccagttctaaaagataacaatgaattataggattgactagtttccttggccagtgttcaagtcttgatttgtatggaaacttttttttatgttgtgagctgatttttaactttatcagagtatactcatctatattccaagaagacactagcctcaagtttgtgtatttcctttcttcatttctgtattctggttttgtatttcaagaacacartaaatgggggatggggtagaagtacgtcctcatttctagggagcctaccagcactgcagatgcagcaggcccatgcagcaagtgttgaacagcaaggttctgtaatattttcaaagaagcgttactctatttagttaggattccaacccagtgtagggatgtaaaggtaatttatactttcattaatccagaccactacagccttcagaataaatatcaaatactcrtcagactgacaaaattcaaggaatggataagtttgtgcttgtctcagtttatagtcagtggaaatttatacattgctggtaaaagtatggagtgctgtagattcttaggtatctggttgtatctgataaaattacaaactcaaatgccccggagtcagcaatgttctctggggcattctctcttacagggtacaatcatgtgaatatatttcattgctgtggtagtagaaaaaaatagaagtcagaatttgcaccagggggagaatagttgaatgctttatgatgcagctgttgtggaaaattgagttgtctcacacagggcaaggrcagctctgtgcctatctctaggacacctggaagtgtgatgctgaacactgcctaagacaaggatgagacggactagctggtgatttataatgtgctgtttaaggtttgaaactcccttgtagccacccaagactagcttctctactcagtttaagcatatatagagattgatggcttaactagttttactggctacacagtttgccttggctagtcaactagagggtagaaaagacgccactggaaacttttgcctgggctttcctgaaattcagatttcacatacataccatggagcttcaacacccgtgttgagggtgaaagagaagggatcctggggagccatgcctgtcagtctctcaggcctctgatgcttttctggtctttcattttcctgctgtaccatatcctttgccttgagtaaagtcttctgtgaatacatcctgtgaagtcttgtgtgtccacctaattatccaacccgttgtaattgacacatctgtgccatggagtattttccaaaaatgagttaaatatctctgctwttcattaaagtatttatggcatgttgagtggaaaaccaagtggcagagaaattttaaaagggaaagaaaaaacaagawtgtccatgtttgtctagagaaaggtgtgygaggattcatcagttagtactccttactgtgagaaactggccttgagaagaggaatgtcagcttttaccttgtatacatacctgtcttgctggaaacatgtattgattttgtcatttggtagaaaacattgaatatgtatttaaaagtttcttagatgtgtacatttgggcagtatgccacatttttctaagtatttctccaataatgaattgagagagaacatttgggtggagaggagaatgcactgtttggctggagacaaagatycgcaaaaggtcggttggagaaaggaggtaaataagtttgaacgtggagagaaaactgatcagagcaaggttgagggaaaatgagcacgtacagaagatggaggcgtcaagcagatttgaaggaggacggcagaagtgcagcagatttggaggcggttttccatgtaagtgccactggcttccactatccgttattgagtgaagactctctggcataatctgttggatctgagaagcctgttgtgacacttcccatgtgttaaatggcacccaacaaagtggatcagggctattttttacatgtgaactaacaaacatctgtaaagtcacagcatgttgaggagggctagattaaattacagagctggaaggagtggccctgagctgataccagagaacagtttgtgttagtgcctctgagggttacataaccatttctaactgcttgcactgaaaattggtttagtcacttataaaactgagatgtctattttaagcaaatgttaaaatagttcattggcatctttttctgtagctattttttaattcagttatagttcacataccatataactcaccatgttgaaggatacagttcaggggtgtttagtgcattcacaaggttatgcaccgatcaccacaaccttaattctagaacattttcattaatccaaaaagaaaccctatacatgtaaacagtcagtctttctttcttccttgaatcccttgcaatcactaacctaccttttgtctccatggatttgtctgttcttggcatcttatgtacatgggatcatacaatacgtggccctttgtgtctgggttctttcacttagcatatctccaagattcattcatgtcattgtatccacacttaaattatttttatggcagaataacattccatttaatggctataccacattttgttatccattcatcagttgatagacatgtgggttgtttctaccctttggctattatgaataatgtttcagtgaacattcatatacaagttttgtgtgaacatatgttttccgtttgcttgggtatacacctagtagtagaatttctgggtctrtggtaactgtgcttaactttttgagaaactgccaaagtattttcctatacaactatttattaaatgtcatgtttatgttatttttaacatgagccctactaggtagtggagttgtatcttcagtaaatctataactgttgcaatggttttatatgatcctatgacagataagaatattagtggatccagcattccacccmgytagtacttactgagcaccagtgtgtgctgtgtgataacactggaatggtaacagtgagtataatagggaaggtttctcttgtcatggatcttataatctgggggaagagacagcccttaaataatcctgtttaattaagtatacagtaaaactgtgatgctgtgataagtgttctaaaggaaaagtgcacggagctcatttagatttgggggtgaggaggaaggactgggtgtcaacacaatgtcccctgagaaagtgctgttaaagctgagatctacaaggtgtgtgtacaagttaactaggtgaggatggagggaaagagaattctaggcatggaaacatgtgcaaaggatttgagacagcagagagcatggtgcgctcactacagagggcataaggagggtgtgttgggagtgacaagaagtgatgacaggaaagaggcaagagctgcttcataaaaggccttgtagatgttttgatttattttttgagcctagggaagccaactgaagagttctgagcaaggggtgacccaagtttgtgtgtatggactgatacataataatatgtaattataacatttatgtaaaatcatcatagataatccttatagctacactgtagaaactgaatttgaaagagattaagaatgaatgcaggaaactagcctgaggctaatacagacatccagttgggagggggtggttccttgaactaggggtgctgatattggtgatggtggagaagatttttaaaatattggcagattttgagatgctaaaggcataaaatcaacaggaagtttttagtagtaaaaattattccagagtttcaaaggcatttttctgtaagagttttaaaatgggataaacagggaggcatatgagcataataaaactgccaaaaaatcataatgcagcattgttcacaaagagaaattaagttgcatcaaaagcattgctacagaaacaacaaaataaaagttaaaaaaaccatacccaaactaataagtgaagtaacaaaattacaggatgacaaggtcattcattgtacaaaaayttaatgcatttctaaatattgccaatgactggaatatagaataaaaaataaccctcgtgaggttaagaaaaaacataaaatatcaagaattaaatctagtgaaagacccattcacagaaaactacaaaacatatccaagaaaaattaagatgtaaataagtacagaaagatagcttgtccgtgaattggaagacttgagacccaaatcaaattccaggaagatagtgtgttctctggagcttattcatcctgtctaatctgaagtcttaatcttcatgtcaaatatcttgattttagaaatattggacacttatagtttttttttaaaaaaaactaagtattactattgggataattactaatatgagataggatccgaaggaaataagtggcaatacagagctctagacactattgaccagtttttcctaaattaatgcaaacttatagcccactcactctgtcagttgatcttgggtgtagttgatttgaacaggactttaccatctctctttgttaccatctctcttattatattgtagccactgggttacataattaaaggggagctctcatttatttatttatttatttattttaattttattttattttatttttgagacggagtcttgctctgtcacccaggctagagtgcagtggcgtcatcttggctcactgcaacctccccctcgcggggtcaagccattctcctgtctcagcctcccaagtagctgggactacgggtgtgcgccaccatgcctggctaatttttttggtgtttttttagtagagacagggtttcaccatgttggccaggctggtctcgaacgcctgacctcaggtgatccgctcacctcggcctcccaaagtgctgggattacaagcgtgagctactgctcccagccctcatttattctttatgctttgttacaacttattttgaggaacatactgttggactctggcagagacagcacctcttgcttttctaccggaggctgttttgactccgggtcagaaacaccaaacccctactgctccatgagcaacatcgagcaggggatttactcctgggatcagtttgggtgagctctgcaggcattagagtcttgtgtttcaggatccagtgatcaatttaaggtgcctgtgctttagatccttggtccgtaactgtttaagcactgtaaaaattggtactttaacttctgcggttaagatattgtgctggaaatactttatttgagctctctctagcttggaatgattatttttttaaattaatgaagttgattcaccaaaatgcactgtgaggtattcattaatttgttttataagcatctgaatgtcccatataccaaaagtgctgcaagtacaagtaataaaaaaaaaatggctaagacataatgtatgtgttcagggaatttagaaacacagataatattttaatttaaataatttatattgtgaaacactgagttcaaaacatttttgtttttaattaatattaaatttgctgtttaacattttggggattattattgtgatcgctttagagggttcaggcttcatctatcccaacatcaaaagaaactgaatctgtttttgtacctataaattatgcattttgcaaatacttactgagtagctactgtgtgccaggtactgtgctgtttccagggaatataatattaaaacaaatattaaatgcttttccctcatggaatttacatctggataatttgttgatgggccttgacatatttctctccctaagtactaagtgctgtgccggctacctcacatactctcttatcctgttttatttttatttttatttttatttttattttttggtgtttattagcatactcagtgttatagcacagacaacatcacaggaaaaaaaaattatactggataaccctactgatgtgaagcagtagcgaaaccctaagaaatacctaccccccatcataatttaatagtagcctcttcttctgccttttttttttcttttcagaaaaccaaatatagaaaatttggatttttagggccaggcgcggtggctcacgcctgtaatccaagcactttgggaggctgaggcaggcagatcacttgaggtcaggagttcgataccagcctggccaacatgatgaaatgctgtctctactaaaaatacaaaaattagccacacatggtggtgcatgcctgtagtcccagctacctggaagaccgaggcaggagaatggcttgaacctgggaggcggaggttgcagtgagccaagattgtgccattgcactccagcctaggtgacagagtgagactccatctcaaaaaaaaaaaaaaaaaaaaagaaaatttgggttgtttttgctttttgtcgctgtttgtttttttgcattaatataaacctaaaggtacaaattctttctctgttggctttatgtgttaaatttttactaaactattagaaatctattattctgtgcttgtgatttttctttttaaacattgctactcttgtagcatctgaaatgtttttaagcttgtcgcttcctttttcacatcatttttgtggctttctcctccagctgagccccatagttcctctatgtgctaaagaaagcccttggtaacaccaatcagatgctctctgttagtgatgttgtgggagctaaaatatacattggttgtttctaatttttgtgtaagtttacatattcttgctatcataattagaattttaacctataaaaattgctactagttattttgactgaagctattcgtttaaaatkattatttcatcagaaatggccttttcatagtaaaacatgttgtttaaaatgtcaccttttctctttccagttttgagaaatggtgcttgggaaattgtccactgggaaaaggtatgcactgatttttattttgttccaggagaagaaatacatagcrgtgtactctagtatatataattttttgtataatatgagcaaatgtgaagaattttactaatataaaagctatttagtaatataaacatgcatggcatcttcagtcacattcatttaatatttctgctgtattatagaaagacttattttgaaaaatatctagaactttttgtttttttcatagtatattttgagtactgttatcatagattttatttaaccatgaactgttttgtgttgtaattttttgctttactcatctactgtccaagtaaaaataagaatttgagttctgatgttttacttctgcatattttacttccaattcatatagtgagactaattacatttgcttacyactaattcctttaaaacaaaaatcttacaaattaaacattgtcttctaatgaaatcagttctttaacatcaaagattaatttgtttataggacctctaacatggcagttagtaggttaagtcataatttaacaaatgttattcaggtgtttattcttttcagccttcactttcaaaaggtaagcaattattattagttctcccttagttctggaagaaggtttaaaatctagtcatccacaaatgaatagctttggtaacttggtaaaagactttttggagtctgagccacccttcttagggcactttatttcctgggattgccaggacattagaggtgtatctcacaggacagtattttgctaggacaatcgaagtgtaaccaacagtttatttgcactccagtacttcccagctagttgaagtccatgcccttgattctaccttgtcatggtcatcttgtatttctgcaggggatatcttgtaccccccaattaaaaattaattaaatttctgttgattttcaatcagtggctagaatagagactgacatctcctctttcatatagttgaaaatttacccctattttttctttggtttttgacatgagagcaacaaatgggaaaataccttggttgtgttttatttatttctgtgataggaatctctttttcagaagaacaaaataaaaatgctaaaagcaatttcaaaataagtttcttttctactcttttctggcacctatggaattaaacattttagaaagaagacaggtaggatataatcaagtatgataagatgaattttattacaaatattattttacctagggttgtcagtgtagttaacataaatatgcatgctaataaataacctaggctgcttgctcagaaaataaacagaaagtcaggagataataatgtactacttcactctaaacctttaaaatgtcttattttcctaataaacaatcattatttcaagattgtgctaacctacctggattattgtaattcttacttttcctatttttgacagacaaatcaccagccaggattacccataataatagcattttcagtcatctcacaggtcaatggcacacctaacctaggcatcccattttgagataaagaaggacagaatttaaagtgttgccaaaagtcatccagcccaaaagagctgaagttatttaataattagaattatagaagtaattagaatcactaaaagttggttcagtgatgaaatcatgataaatattcaaaaattaacatcattcttaagttggcagtatcaagtttgaaaataaagtgaagaagaggtctcattcccagtggcctatgggaggcctacaagtaaatttaatgtatgtgtatgacctttgtaaagaaagcatccaaactttgatattcaagattcatacaaatttacaagtatgtcatattcccagaaaaattaaaagtgaaatatcacttgttccaaattatgaagtaatataatcccagggaaattattatattttcctcaagaattgactaaatttttcatctgatttgcaaaaataaacagttaagaaagtagaatatattttggaaaaatgaacagtgtgtaaagattacaggtgaaatggaaagcaaaagttattaaaacactgtggtttgcaaaaatagacattgatgagtagaataacatggagcagatttaagtagtatagaataaaatatagtgccctgaaataaggcctgtttaatatttgaaaaaggaggcaaaaattattttttaaagaattgctatcacagattagcagttttaagaaatagcatttgaatatttatatctaagtcacaacctatgctaaaataaatgtcaactgactaaaagagttaaatgttaaaatgttgtttttagaaaacgtacaaatagaataaaggccttaataaatatttgaagaagagcaatawctcaaaatctatggaattagattatataaattttaaaacaaatacacaacaaaaactgccacaaataagtaggcaggctatgtgaaatatttgcaccaaataggacaaatgattaagatcattgttatataaataggaaaacttgacagtaaaccagaaatatgataattgaccagactcagtataatattcaacctaataaaatttgcaaatttaaaccatattgaagtttcatttgctacctattcaataaataaaaacaaacatttcagatttatttttatgaaatattttatttacatactattgtgaacgagcagtttggctatttatattgagaactgtgaaaacgggattctggaaatttatcccaagaaaagaaaaagttggagaatatctccacgtgtataaaaatgtttattgtagcattatttacttataatagcaaaaaactagaacatatggaaatgcaacaatagggacagttttataaattatggcattttatactcatattttgtgacaagtaaaatctgtaatgtcacatggtgtagcaacacagaagaaattatactattcattcgacaagtgtttattgagtgcatatgccaagcagtgagcttaaagcagcaagcaagacaagtaagggttcctgtatcataagatataatcataggtgaaaaaaaatagtactatgtacactgaaatactggctttgtaaatcgtttattgaacaagcgaacaggcacaaaagcagccttacttgttgggataacaagattttgaggcaagtcttttctttgccttatatgatatttagtccaattaaaaataaaatcaataaaccaaaaccaagagtgtcgtctacatgccaaggtaatatgatagaccttagtgtaaatgggctttacttcagggctctttctctgcctttctaaatgtgtggctactgtggttgctctttaatgatcctcaaaggacctacaaatttkcctagcatgcatctaatcattcacagctgggcagacttcagctctcagatattagtggtttatctctccagttactgccctgaaaccttttccctgttgcaaaaggttaacttgcagatacatagttttaaaagaaagtatggtaatcacaaagccctacacaaggaactacattgtgactcctgaacggtaagctgctggcttcattgctcttgccacagattatttctttacaatgaggtgcagctaacactgttcacaggtttttgagatgtatgcaggtggagaatttagccaaagaatcttggaatcaacgtattcttctggcttattaaggaagcatggtgggctgtatgcatgtgtaaaagttactctgtaaagccacttttgtgcatgaagcttccaccacaatatgtatttcttttttcttttcttttttttttttttttttgagatggagtctcrctctgttgcccaggttggaatgcagtggcgcaatctcggctcactgcaacctccacctcctgggttcaaacgtttctcctgcctcagcctcctgagtagctgggattacaggtgcccgccaccatgcccagctaatttttgtattggtagagacagggtttcgccatattggccaggctggtcttgaattcctgacctcaggtgatccgcccgcctcagtctcccaaagtacggggattacaggtgtgagccaccatgcccagctaatagttggatttttaaatcaggctattgcagtctgataatcttactattttacataatccttgatgttgcaaatatgagtgacttcagaaggctgtaggtagtggactgaaagccctaaacatttccttaactttggcattttggggactaaaattgctttatcatgacattcctccaattagaatatgtatgattaaagcatttttgtcatcttgactttttcttctcttggttcctcttatgcacacactaggctggaaggggaatgccgtattaggagctcagaatccaaaaggaaagacaggtgtttggatgtcttttgagaaattgatcttaaacatagacattctaaggagttaagttccctactttccttacagtaaagaactttagcagtcattgatttagcatgctttagtaagaacttcagcatttagtaagcccctggttttcccaggccactggggtaccatataaattgttactattttattgagtttaggaaccacaagcccttcttttgtcttacaatgagtaaagatgttggaaagcagcacaatcaattagggatttgtttaagtctgactgttagactctaacacgatagtgtagaggacgtgattctgattttgtgaagcacacagttgaatttaagaggaaacattaacatacaggagttgattaaagaaaattaaatggtaacctggatgcattctaagtgccatgatttcagagaatttacattttattatctttctcagtgagtgtaatcacagtaccatcacagcacattattttaaggaccagtttacatttatacttgcagtttttaatttttcctctttgcccttttttgaggtagggggtgtttgattccaagatccctggtaatttgccagtttcagctagtccaactttcagatttcagctgaattattttttgaatcaagggacccagaacttaagcatacgtgtcataaataaaaagacaatacccctgccccaaccttttctaacctcttcttttggtaaataatagaccgcagtgggctgcctctgcagtaatttcttattatgattcccacaaaagacactattctgttcttaccctcatagtgttattttagagttcaaggaaaagtagggagggggaagaacaaacaggctttaatttagaaagtcttttttttccatctattaagtattgaaattcatgtttagtctcatttgtctactaagaggtcaactttcatgatgtaaagggagcggctaacagygtaacttggtcaactcagttaagccaagttgttgcttagttactgtgttgtttgccaaaagctatatgacacatctgtcacttaaatgactgctatcagtttttgaaaatagtatctctttatctttatgccaggctcagaaaaatgctaagaggtagtacaatgaagagattaatttttaatttaaaatacattgatagtttcacaaaattatgcaaaatcaggatttgcagacagtcaaatgtggatttgagtctaagctcttcaactccccatgatcttgagcaaaaatctcagaatctcaaactcattttctttctctccaaatgatgagttataagcaatacttgtttcacaagcgttattgtgaggagcaattatatatgatagcgtctccagttgcattgagattttcttcaataggataaagatttatattggtaaatccctcctttatatttttatgtcagagaggatatgagaagttaaggtgtcaattaagtggatagaatagattgattttatcaagataagttatatatccaatatacaatgttcattttttttaaaggattcctccaaccctggtctcactcctagataattttcttccattttgtgaagataagtggttcttgtttgccgataaccatttttactgtgtattctatgctttttacaatgggttgtatatttgtaactatctttcaatgcagataattaaccaattmccagttttctttcaggtaaatgttggagatatagttataataaaaggcaaagagtatatacctgctgacactgtacttctctcatcaaggtagagatgcctactgatgctcaaacagtgtagaggatggtttctctaccctgcattgaccttgtgatttctccaaggaaataaggaataaacgaagaatttaaaacctctctaataatttttatttaaacatttaaaaaattgattggacttaaagggctttttcatgtttgccatatagaataagtgataggtactatactttatcattcaaatataattaagagtctactctccctctggatctatccagatcttttgtggggatcataactcttttaagatttcctgtcatttattttatataatacatggattgggttctattgatattttttatctttcagtccttgttcgtcataaatccctacagagtttcttgattattatgatggaatggtataaaaaaatggatgaatgattctttttgccattatgccttttgaaatgccatactcttccaacacaaaagtactttgctctttcttttaagttctttcagttacttaatttaaataattttcattttactcatattttaatcatgaattagtagtcagaacatatggcactgttactctttaaagaatgtgactttcaaatggtttyaggtttaaaaactataaactagtcctattttaaattaagaaaaattgtttttaatattttagaggttgtttatcatcatttccttggacaggtttatttgtaaatccacatatgaatatggacagtgtccttttttcaaaatttatttaatcaggtcatcatttaaagtgatttgattcatgacaagttagcgaaacttaacaaataaaagtatttatactagatatttatagaagtaagtctacaaccaattaaagtaactgcaggtagttatatttctataattttgtgccatgtacctataggtttttgttttcagaaaaaataatatagatgttttcaaatcaccccctctgttcttagtttcctttgcttataactttatcaggataaatctctaaaactgagtgaagctaaccgtccattcttggcgtcttcagaattagcttgagggagagcttattgtcattgtctcaggttctaggtagtatcaggcactagaaagagctctctttagggagtgaaaagccaggattcttattctgatttggtgattttgaaccaactgcttaatctctcatgccttgatttcacatcttttatattaagatggattaaatgatcaaattccaatattccccaattctttttgtttaaattgataagctttaagagtaccttacagaatggtgtccattcagttttactaagtaaaaatgtgatgaatgtattggacacttggccatctgaatgtttgaagtcttgtgctgcataacaacattttggtcaattacgaaacacatatacaacggtggtcccataagattataatggagcagaaaaattcctattgcacaaatacttagtattgtgttactgtttctttacactattccatacagtaacatgctgtacaggtttgtagcctaggagcaatctgctataccatatggcctatagactataccatctaggtttgtataggtaccctctatgatgctcacacagtgacaaaaatgcctgacaatgcattcctcagaagctacacctgtcattgtcacgtgactgtatataagttcaaaatgatagtaacaccttctaacaatttgggaaagtattgttttcccaattaaactcttagagacataattatagaatgaatcatataggctgaaccgttaaatacaatttttatttttgatgctcaaaaatgtgaagataatcgactatactgccctgaatttgtatttaattttaagttggaaattttcaaaatctttgccgtctgactctatccaacttcagaaactccccagcaagctacttgtatttcttaaactttagaccacttttacagaatttgttttataagcattaaaaacacttactggtggctatgaatttcaatttatcgaaatagtttctgtgtcttaatatggtctccacagcgattaacttcctccaagattatatttttaaaagattatctgattcattgctttttgttattgagtagaattcaaaataaaagctgtgctgctagacatttcaatccaagtagcagagtaccacctttcagtattttttttcctcaaagggttttagcattacttagctcctttgaatctacattaacctcatgaaataggtagtagttgtttaatcatttaactgaaagagaaattttgactttaggtaatgactaagtcagggttggaatactcctaatttactatcttcacactgtccactatcaaaagaagtacatgatgatttttacccgcaagtgagcaaccacttagcagtaagagtaaacaactgtttataatattttaattttcaatttttttaatttttaattactaagagtacatcttctgtgaggtagtttgaaattaaagcatgaacatggttgaaagttactgtgtttcgtaggctttcattttgaaatgaaacagattttagcatttaataaataatgaatacatttatgtgttaagaaagtataaagtagggtaaaataactcaagctgttaattcaagtccatattctcmgcatgtctatttcataccctctctgaaaaaatttctctggattcaaaggcttacccttccaaaacaatgcattctctagacttcattaattgctaagtaactcaaaaggctacagttatgccttctgacttcctaaggcataactgcaaagcttcctaaggcataatgcaaagctgacttctttgcagctttgcattaaagttagtaagatatttattcaattaactttaaaaatattttggagtcagaacatttttaatagtttttttttaagtggggcagggactagtatactttttttttcaagaccctatcacaaccctaaaaaataattttcattattattttcttccttttttggtacaagtggacatacagtagatggcatgargttgagaaatktgagaaagaaaaatctagactataatgtagttctctataaaatatgctttaatttgataagcttatgagtaaacttttaaaaattaagttttcacactaaaactttaaattgggctaaaaagcaaataaataaccctcaaatattaaatgttttcttatgccttcagacctgatcaaaataagttttgaaaaaaattggcattagatgtttttattaacatgtattattttctataataatttcgaactttctgtctcttttgtccatttgtttgttttttttcctctgttcatttttttttttggccattttaattattttatactgggacgtgtaggtggcagtaggggagatagtgaaagtgaccaatggggaacatctcccagcagatctcatcagtctgtcctcaaggttagaaccactgagtcgtataggatgcgtgtatgtgggtcctcaccgtaaaccggagaacagttgcacccaaatatggttgagttctgtgtctcttcctttaaaacacaaactttttatactgcttggtgatggacatttcacagatgttttaaagggatttttgaatrctatgttgactgatgcttgtccttcagctgggcaaattgaactcctgttgttatcaataggagtctaagaggcatgacagtaaaggtagattttaatttcctgtgcaccattaatatatattcgtatttaataacatgcctaagtactaaggcttaatttattatctctccgggatattattttgaataatgttaagcttttcatgaaacagtcattgaaaattgattagattataaacatgtcttattcttgtattttaaatttttctgtaagttctgtaaaatccttccagcgattgtgactataatttgggctcatagggtttatagaggaccccctgcacaaagctggatgttgcacattttgtaccgcatgctttgggatcgacttttatcccacttgtatctagtgacaaagtgcacgttactgtgatcaatttcagctgtctactagtgactgtattgtgatatgcatcttgtttcatttttcacttactaatcaaaaagcctgctttgcctctcttgactagtttgtgttttagatgtcatcataatttgctgaaatatttatgatctagcatgattccttatctgagacttcttgctgccttttcacagcactattaagaattgcttcagtaactgctgtcctaagtgattgttgagaatgttctgaatttcgatgcttattttattaccccaacttcaaatagwwcttagccatttgaacttcctaacttcctagccatttaaagacctagataagttactttatgcaaaaaaaaaagtagaattagaatattattctaattgtcagaatatggaatcaacattgtcatttagtattttctttgtcatcgtgcttctatattatcaggtgtgttttataaattcataaactatgtttcaaatgtatacataagtaaattacaaatttcgagcaatttccagagccaaattgctattgtgacagtgattttaaaaataaaattttgaataagttatagagtgaaaatataaatattgaaggacttaattttggggaaaagtagcagcttttacgaaagaaagctcatagggtaaattgaagaacctgcagagctactttaaaatgaatcagtaaaatatttttgattaatgtctatgtgtttaagcaattttcacaaatcttcgggccacaaaattaagctacatgcccatttctgaaactaggaatagtctgttttgcacatgtacaagttggaagttgattagaaaattccaggtgtttgtaatttgtaaatttttttctttctagctttgagtacacatgcttataagagattacatttataatacttatgtgatattagtaaattaagcctattatataaccaagcattaattagattagaatgcttttctttagaattaaggatcagattatacagttgggctacaaacttagatgtctgtagttgctgggcaagtcaaatcagcatgtgaaagggaaagataagacagtctgggctgtggtggtgtgataaaactggagaacatggaccccttaggccagccgccacacaccagattttactaagacacactggtggggaacccatgaagtgcatcttctaggtcaaggagcaatatggcctagctgactgattttagttttagtttttaccgctgtgagaatctctcaagcaactttaataggagagcaggagtggaaaacatagagggagaaagctatatatccgctttcattgtaaaatttgttcatattactttttttaaataaccttaaatttaaatattatggtttatgtgatcctattcatcatagctaaaagggtagtaaatgcaggtttgtagaactagcaatctggaattttctcatcaaccactttcttaaccaatttacatgcgtgccatgagcatgaaatctcatgtggtgtttttgagctaaagataaatccggacacaaaactgctttacatttcagatacagtctgtgttgtgtctatgtggatgaacaatttaaatataatgtgcaaatctattcatttgcattatcttgaagaccattactgattgttgtcaggaaattgcttttgggtccttctggctgaaaagctaatccgtgagttgtcatgcatgggttctgcctcacagcatcttgctgttagaatgaaaatcatcaagaagctaagtaactattactttgtctagaacgaaargctttagtgagtctgagcatttaaataagttattattatgcttttcttcccgcactaaatctttgtgcttctcaactccaaactacagtgagccccaagccatgtgctacattgaaacatccaacttagatggtgaaacaaacttgaaaattagacaggtaagatctgatacaagtatatgtataatcactgctattttattacatggaattaagagcttctttctttgtgttattgtcttgaactaatctgtcctattgcaaatatgttcccatggaaccacaacaaagaggttttataaactggtattgttaagtattatggaagattctgatgtatttgtctggttaaatatgatctatcttatagatatatttgtaatatttttaattatgtaatagctaacactcagataatagtagttctaagtgctttgatatgttttaacttcttcctattcacctggttcaaattataatttgactttgccatgttaaaaagctgtacaagggccgggcrcggtggctcacgcctgtaatcccagcactttgagaggctgaggcaggtgaatcacaaggtcaggagatcgagaccatcctggctaacacggtgaaaccctgtctctactaaaaaagtacaaaaaattagccgggcatggtggcrggcgcctgtagtaccagctactcgggaggctgaggcaggagaagggcgtgaacccgggaggcggagcttgcagtgagccaagaatgcgccactgcactccagcctgggcgacagagcgagactctgtctcaaaaaaaaaaaaagctgtacaaggatgggcacagtggctcacacatgtaatcacactttgggaggccgaggcaggtggatcacgaggtcaggagttcaagaccagcctgaccaacatggtgaaaccctgtctctactaaaaatacaacaagtagtcggacatggtggcatgtgcctgtaatcccagctactcaggaggccaaggcaggagaatcgcttgaacccgagaggcggaggttgtagtgagccgagatcatgccactgcactccagcctgggtgacagagtgacactccgtctcaaaaaaaaaaaaaaagaaaagaaaagaagctgtacaacaagctcccacaacacaagtttactacataagctccattgtacacccctgaacctaaaattaaagttttttaaaaagccgtactttctattgccattcaaaaactctcactcatcttactcatcttggggaatagtttacatttctatatttacttttcatatcgtgtcaagcaaaaataactgtaaagtttttaaagttttaagagggactttaaaaatgtatgcctttggtttctagatgaatgatgaaaatgacatttgggagggttgggatgtgttggaactagatcatcacagagggcctggacccagactgccactgtgtgaggggccctgctcagtgacagctgcttctggttggccagagggaaaacctgttttggagtttcccttctctggaataaaaaaagagaaacaaagctatgttctttgaacacagattccatccattttcatcttgtttagattctgaagacagactcagactgtatagtgctaaatattacttttattttcacaagcaaatggttctttggggactgacttcaaattatctttgtagactagcttatagtctcctaaatatatttaagaactctcataaaggtgccctattcttgcgctaaaaacctgtgctcaagtcagggaggaaggtgtctcttaattatgatttgacagagtagaggagaattgcttataaaaataatgggatcttttagatcttaagacttggatgaattcaaaattcctcctctttgcccagatacaacttatttaatatactttttgcttatttaaaaattccaaacagggcttaccagcaacatcagatatcaaagacgttgacagtttgatgaggatttctggcagaattgagtgtgaaagtccaaacagacatctctacgattttgttggaaacataaggcttgatggacatgggtatgtaaaatccgtctttataaaaacacagaatccactgtgtcatagagtattgctgtgtcttytaagtctggatacatattatcttcttgtgtgctaagtttgagtcctcaaaaccctttttaaagcatttttattctgccctgagtccttctgtgaagatgttgaatcttatccattcatgtagtatagctgatgacttcccagagttcctgccaatctggctggaggatattttcagagatattcccagcttctggcacattgtttcgtgggtaaacaatgggagtaagaattacctgtggcttattctattctttggccaaatactcgtgttataggcttaactattcaatctgcatggcctgggtcctttcctgtgatcttgagatgcttcaaggagttcagactctaccttcaaggggtctattgtactggataatttattgtctcctccatgaaatttcaaatgttctttctagcctgtggtattaattatagtcatctcatctctttttgttacctgcttcctgcctctcttgtttcttctcttctaccccttccctcattcattcaaccagtacatattaagcacccagtaagccaagccagttaaggtgttaaggaggcaacagtgaacaaagcagataaatattcctggccttaagccttggtctgttcaggctgttgtaacaaaatatcttagactgggtaatttatgaattacagtaatttattgctcacagttctggaaactggggagtccgaaatcaaggcactagaagattcagtgtctgctggggcctgtttctcatagatgtcatctagtatgtgtcttcacatggcggaggctctcggacctcttttgtaagggcatgaattccattcccaaagtccccaccttctgatacaccgctttgggaattcagtttcaacrtgtgaattttggggagacacaaactttcagaccatagcaccttgtgagcttactttcttgcagtaaggtaatggcaaacatacaaacaataagatgataaataagaagtttatactatgttagaaagtgataaatgctttgggaaaacaaatagcacagaataaggaagattgggtgtctttggaagggaacaactttttgttagggtggtcacagttagcctcattraaaaggtaacatttgagcaatgatgagtgggaggtgaggacatttgccttttgaatatctggagggagataattccagatggaaggagtagtcagtgtaaattattagttctgtcattacatgatcttcaagtggaaaagtgcctggaataattgtggaatgttagggcagtgtggttggagtgctatgatcaatgaagagagtaatagaagaagggcctagagaaaatagagggccagatcctatgggctttgtaggccattgtgaggatgttactctgagtgaaatgggaattcactggaggattttgaggaagaaaggtcagcagttcagttttggactttataagtttggtccaaacagagatgtccaggaggctgttgaatatatatctgaagtttgggacagaagtctgggttcatgagatatgtttggaagtaagtggcatagatatttaaagccatgaggatggaagaaataactgagaatgaaagggtatagacagaaaactgaagagacccaagagctatcctgagaccctccaacgttatgttgggaaaggcaaaggcactagtgaaagagatggagaccaagtttataggatggtaaccaagagagagtgaagaaactgtaccaaagcagggggaccaaaactgagtctgacattgctgatggtcaagtacaatgagactgaccactaacatatttacgtttggcaagtggagatcattgaaattgattagaacaggtgcctgacgatagtgagtttgagaaaatggaagaagagttgaaaatagcaagtatagacttctttttcaaagagttttgttgcaaagagagcaaagaaatgaggcagaaactggcagaaaaggtgaagtctttcctgcttcccttctcccctcttttctcctcctccattcccttctttccctgcttcccctactttatggtataccttatctcccaggcattgtagtggccaactaaatgttggctaaatatactagttgaactcagcagcctgagagaatgtttttggtgttttcattattttgtaattgcattattagagtgtttgaattctaaaggacatttgaagtataccctgaactgtcatcctcattcagatcctccaaaagctttcctgtaatccgtgaagtaattatatgttgttctaaaattttcacagagtgatcgttccatgaacatatggttaaagactaatgatagatttggccatttataccagtattgtttctatagtctgacattcctaactggccagcttccatgtcttaacagttttctgtcaaattgttgctgagcaaatctatgctgtgaaggagaaactttgtatgatggtgccaagattcaaggtacaaagagaatttatataatatgctgtatttcatgtgaaagatagattttcaagacctttgtatctgtggcacttttggggtttacagtgattacccaaagctcttggagaccctttggaatgagtatactttgttgcttttaaggatgagggtcatagtctaatgccagaagcyttggaacaccagctatgatgaaaactaactaattcttcttgagtccttgtaattgaaaagtggtatgttttgcttttgaagagtttgtgtctaattccggtcaatccacaccaccactgctgaggtgacagttgccatattataccccattggctgggtaaggaacagttgtcacaygtgtgtcccagagcatagtgcagcttcccaagaagttattggaaacccactttaggcccaaggcccctttcaactctgaaatgcacccttaatcttgagatatataccagaggggtttccttccagacaggtcctaaaggcatgctattgtacataaagaatgagagttgcaattgctttgttctttctctaaattggaatacagtatttcctaaggattcattcaagtgcaattgttacctacgcatcgggattgattttacctgtgtcagtagaatttgtgtagttcctgaatgtccaaggcccaagctgctactagccttccaagcctactgggccagagcagctcaccagaaatgaagacctcagcctcgctttgcctccacttacaaagaagttctgtgttgtctgtcgacttttcttgtggaattgtttccttctttttccagaatttttaaatatatttttctttatatttgaccttttttctcttattaaaatgaagacttggtagtagtaatccatgacccattaaaatttatgtattacattttcctcaagaactctagtattgtggtggctttgytccttcttatgtccctgtgtgagttgtatcacccagtaacctaccatagtgggtagccttgtgaaaaatccacaaaaataccaactgggaccttattcatgaaaaatgtgtcttaaatgataaggaatgaacagctccaaaatgcttactattcattggaaatttattcacaattcttgggaaaccaatcttcaaatactataaaaatgaatgttctagaggttttaagtacagggacttgtctgtagggggtcagggctggcaatgcaaataagtggtgagatctgtgtatttatcttaggaatttttttgcacctttattatgtacaaagctatttttaatttgggtggggggggagagagagtgtgtggggggtgggtgtgtgtggtgtgtgtgtgtgttgaggctgaggtgagtagacagattccttatccccatcacttcctaacacttttagaaatctaaatggacttatttaggaaaagttataaatagttgtgtaaattagcctctgaattccaaaacattacctattattttggttaatgtattagcttgctcaggctgccctaacaaaacaccatagactaggtggctttaatgatggaaatttatttttctcacatttccaaaggctaaacatctgagatcagagtacctgcatgattgggttctggtgagggtcatcttcctggctggcaaaaggccccttcttgctgtgtcctcacaaggacaagagtaaactcctcgagtgtctttttataagggcattaatcccttcatgaggacccaaccctcatgacctcttctaaatcacattagctcccgaagggtcatttccaaatgccattacattggtggtaagaacttcaacatgtgaatagtggagggacagagtgcagtccataccagatagtgaagttacagaaaatgactggttggtgttaaggaaaagcaatgtaaatacttgtgtcgttgctgtttaagaaaattatttgtactggggggaaattactttccagaaataaatatgagaagggttattttaataatgggtacttttgtaactatatggtaactagagttcttaagcattttagaaaatactgtttctaatgtcaacgtaatctgtcctagcaccgttccactgggagcagatcagattcttcttcgaggagctcagttgagaaatacacagtgggttcatggaatagttgtctacactggacatgacaccaagctgatgcaggtgaaatttttctctatgaaaccttttggacctaaggcttttgtgagtgtatgatttacagatctcagtgcagtggtcccaaacataggagaccatctgtcacagactcctgatccaaccctatatgttcagaatctggtactcctgtgagtgggaccttgaaattacctccctataagaatggcttgggctgggcgcggtggctcacgcctgtaatcccagcactttgggaggccaaggcgggcggatcacaaggtcaggagatcaagatcatgctggctaacacggtgaaagcccgtctctactgaaaatacaaaaaattagccgggcgtggtagtggacacctgtaatcccagctactcgggaggctgaggcaggagaatggcgtgaatccaggaggcggagcttgcagtgagccgagatcgcgccactgtactccagcctgggcaacagagcaagactccgtctcaaaaaaaaaataaaaaaagaatggctaactgcacacgggaatactggaaggttcaccagggattatgcatgaactctcaagaattttgtgtatgggtctatggcagcatttactaactattatagtgattattacaagttgtccatgtcatgataagtgatctrcattaaaacatttgtcttgtaattttaatgcaatagtcaactttttaaatttctatcttttaataaaattttttagaaatttgaatcaaatgaccatttttcatagcatttatatgtaaggctatttttgccatcagctttaattcttgcattgatcttcacacctgcctacagttgctccgtccctgtgttataccatcaatattcaatagtcagatgsgtgtggaaaacagttttaagaaactaaatgaaaatctgctctcagagctaatacctttgtaccttgtacaggcatgaaggtattatcaataggcaagykagattgctgttagtgattccaccactagccattttataaattctataaatcttcatttcatattcattctgacatttaattttctgttctatggattttttggttagcacaggtctacataaccatttgaatcatcaaatacaactgaggcaacttgcctctgttattctttatagccaggactacttaaattgttgctgcgttcagtaaaacaattgctaaatgccaccagaaatttgaaagccggagatcctttaaatgttgccttcctatgttcaaatttccaggtgcctgtttgcgggagcatgggctgccttgtctgcctgtcttcctgaacggaaacactaaatgtttctagactaccctgtttgcttacatagccaagtaatgcattattcatcttacctgccacaatgcaaaagctatttttgcaaagggaatgtaatttcgttctcttctttcttatagtttacttcctagaaaaaggcctgggtggtgtastggccttgaaaaaaaggtggttaaccattggcaccttattacatttgtcatgggtttcacataattttcacgtatccacccacatctagatactgagttgtgactttgtcatcctcaacagaatactaagtatagatkgctaaatcattggtgtacattttttattactcatcttgtttctttttacagaattcaacaagtccaccacttaagctctcaaatgtggaacggattacaaatgtacaaattttgattttattttgtatcttaattgccatgtctcttgtctgttctgtgggctcagccatttggaatcgaaggcattctggaaaagactggtatctcaatctaaactgtaagcaataaagtgcttactgcacttttttagattaagacatgtatttgtttcacaattgatcttgatttactttatttcgtattgtttctaaaaagaccttgttgccaagatagctggacatttgatctttatttttcagtgagatttctagcaagtgtaagtaaaatttgggaatcctaaaatttcagaatccttaaaaacataatgagcactctatagtggtataaaatgttcactaagtatagtcatttattatatatatcaacraaaactattccttaaaaatatttttaacataggtggttaactatatggtaaagaaagtagattgaccatgtgtggatataacaaaacatatatatttaaatatatattgtatgtatttataaatatataaaatattttaaatatatttaaataatataaatatttaaatatatttatcttaaataaaatatactttgtttatattttatttaaataaaagtaccaaaaagtggtttatatggtttaaaaatgtttaaacccaatgtattttcatttgaactcagtaatgtggtaagtcctatattaaatgttatcttagagaaggtgctagtaaatagttttcctttagagcatttatccttttattattgtgatattaatgtaccacccctggatatttctgtcaaatgagtttacattttcatttcatgagtacttagccaataaagacttaacttccaaaagtgtgaaagcaaattctagtacaatcacatagcaaaaactggtatttttaaattttttttattatattgatttatctttgcagcaattccaagttgtttttatagttactgatttattatttcagtatcagaactgttactaccatcagtctgtttctttgtatactttataattgtatctggtatagcagttttattttcattttgaggaagaagagtataatgtacctaggagaataatttacctaggactgaatattactcatatagtttggattgtttttgctgctgctgtcttgtttgcttttaaagtatgctttaaattggaaatactcttaagaatttatataaaagtgattctacccaattgagattttatatttataaaccctcagtgctatccctgatgtctctaaactttgtgtttggaagagggtttgcaatatttgacagtcctttcactgtcttagtacttttatacagctcttacctggattaacaacatattgaacacaatgcaattctatcttgaaggatgtacttgagaattaggatagattatcagcaaagtgttcctcccaaattatcaaataagctgcgtagtatggaaaacttgtattatgctaatttgggktcartgcaaataaaatatraaactgtaaatgaygttcttcctgcctctcccaacagatggtggcgctagtaattttggactgaatttcttgaccttcatcatccttttcaacaatctcattcctatcagcttattggttacattagaagttgtgaaatttacccaggcatacttcataaattgggtaaatatgaattatgattgttatcaccctacaaaataattttgtccttaggatrttttgatatctcaggagaaaaaaggttttaattatatctaccrtttcttgaccacagtatcagatttttgaacctaatttgttgcaaagttcctcatctcagaatcacacaagtttacaggccagacattgtagggaaaatgggtctctagttcaggaaacctatggtggtcgtgggagatggagaaccatgagtttggagttaagtgtctgaattatggttctagtattataatttactaggtgtatcaactttctcaagtcacttattttgaaacttattttcttgaacacaatcatagggataatatgccttacctacatcttacagtggttttatggactaaggaatctcttgacatagcaaagagctttgaaaataatcaatcactatacaaataatactgtaattcttactgatatcaaccagattatcatgttatatcatgttattttctacactgtaaacaattttagcttcacttgaatttttcttcataatttttctcttgaatattgttaaatattagaaaaatgttggacatctactttctaaatgtttttaaatgtcttagttttatttttattaaagttaaaattaatgaatttatstaaattaaatctgtgggcctaatctgccagaaaatttaatttttcttttattttgagaaactttgtgttatttttgatgtttctttctttttcaatcattgtaaagtctttcaatatgaacaatattagggtttcgaaaaatatgacatacttttgtaactgctcattatcttcttgtagcgaattatctacctaaactgtcaatctcttaattcattggtaagaaatcagtgtgatttagaaatctaaaatgagctgcaggtgtagctcacttcatgcaggagatatatggctgaaaaattacgtaataggatatgtacaaatataagtaagacttattgaagtttcttatagcaataatagggtaactcattgtgagaatcacataagtaagctagataatcactttgttgttttgattttcaaaaataatatctttcaaagaattatataattttagtattggatgaacccagcaggcttatgctttcaaccacctttctaatatacagagattttataacatctgacagatagaacactgactttccagccttcttttacaaagcaactttcttgtgtgaaaatgagattataactgtcttcctttgattctggttcttcccaatggatctattaagaaaatgcttaatcttgtttctgaatgatagtcttgcaaaatatctgaactcagctatcatgccaattctatcctatcttttcctttctaattaaacattccccgccttctgttgtccttcagttcatgtgatttccagattaatctctattctgatcactttctcttctgaacaaaggcccagttggttaatctctctcttaacacatggcacataaaactcaataacctatttcagaagtgatgttgatcagttcagaatacagacatgggagagatgggctttgaattttgaccttttcatttgacatgaaaatttgtgaactacaaccctgatttgttaataaaatagtctaatatagaaaatgttaatttcataggataatatagtcaagtctcatgattactggacacaaggcaagtacaaataagtaaaaaactatgctctttttttttttttttttttttttttttttttgagacggcgtcttgctctgtcgcccaggctggagtgcagtggcgcgatctaggctcactgcgagctttgccacccgggttcacgccattctcctgcctcagcctccaccgtagctgggactgcaggtgcctgccaccactcccggctgatttttttgtatttttttttagtagagacggggtttcaccgtgttagccaggatggtctcgatttcctgacctcgtgatccgcccatcttggcctcccaaagtgctgggattrtaggcgtgacatttttatcttttgagaagtgcattttgtttttctttcttggcccagaaagtaaaaccagatagaatctcttgggtactttttccaggggtttgaagacctaattatttgagcagttcttagttgctgagttctagctcacattactaaatacctgccttgtgtcggacacagtaggaagcactttgtgtggtatcttttaatccttataataggtcatttatatagaaaatggtggaatgatagtaaacctagattgcatgattcatagacaggctctaactaccatactgttctgcccttactgtggaatrtagtagtcygtattgaatacttttcagaaaaatcgaattaaatggtataggaataacaggaaattagtgcctacatatagttcatcaaacagtgacttattgaagtacgaatatactaattgttttcttttaaagtttcacccaattccttattaccagttgtgttcaatgatttacttaattttattaaaggatcttgacatgcactatgaacccacagacactgctgctatggctcgaacatctaatctgaatgaggaacttggccaggtaaactcaatttattgttgattatgtgtggaattaaaaagttagatttggtgtggtatctgccatatatgataactgcagatgaatggacagcttttaattttccactatttgaataatanatttgttagtgcatgatgaacaattctcatttttaataaatcagtttttaaaaacactgtctcaaggagattttgctctcaaggtaaagcactccaagagcttcgagatgtcccttggtatatagtcaagctagtatgcaacatattggctattttcaagttataaacgtagttttagaattgttcatacctttcagccaggaagggaggaaaagttcatcaacgaagctatgtgagtctagtcaataggaatgttagatttataattcatactatattcacatatgtgtatatttgtaatccattaacatattctaggtttttcttttttgtattgttgccatattccaacttatgctttacaaatagcatctagtccagaattattcttatttcttaccagttcagatgttgcatgaagttaattgcgcaagctgttacaaattctacaattgcctgttgcattgagaaatgctgatagctgtttcagtgctctgtaaatgttaagtagtggtagtggcactttctagtggaaattcagaccatactaaggcatatgtctatatagttttctagtatggtgatagtctttaatattcatatgtgaaaagattcatttgtaaaatactttttaaaaagctgaatatattccttgataaatgggcagaaaatagttccttagtaatattcattgtgcccctgcaatgttaataaaaagcatgaggggtttctctgtaaaagagtggcataaagactktcaaaatattaatgagaaattttaaacttttttaggttaaatacatattttctgacaaaactggtactctgacatgcaatgtaatgcagtttaagaagtgcaccatagcgggarttgcttatgggtgagttttttcctttaattaggatatgaaatacatgcttaattagtgctaacagtttggtacatttgggagttcttattaggggagggtatggggttgtttggttttttttartctgaaaagcagctgttataattttaggacacatgtatatttcgcgtttytagtttagcattgttttcatttgggatgacatgaggtgggtgctctgcccartggtattttcagtgtttagtgttgctgaaagtctctctcttgccctggtaataaggaacaaatatatttccttttacactactataaactggagtatagcttggatctggtaaggacagataatcaggccttgagcagttttcaagttaaaatagtgacagttaccccttttgatactttttttttcttctatcatctctcctttttgcagtcatagagcaatctaaaattctgatgatggaaaggaggtagagacatgaaactcttgaatctggaggataattaatatcatcagaaacttttatcaggctgttaatttctttagaattgcttgttgagcacccatttaatttatttcttacttccaggtatgcttacaagctgttccatagccttctctttaaaatattttatagggtaatgtgagaaaattaatttctacatttcctagaaaagacatcaaaaggtgaaacactctcctggctggttgacattggcctattgtcaaacttgccaattatccttatctacctagaagtgagactagtaaatatcagcctcctactcatacaagcatggacacttgcttctaggttttctggcttgcacccactcttccccactcactctgagcagtaagccagtgacaaagagtgttacattttgaaatgccttagttaaaattataaataagtaaacatttcatgaaaaatcccaaaagtatatggttattcctagatatccttgttctttgcgttacgagagcatgactaaaaatgactataaactatatgtataaacgaggttaaaaaggcagttgagtggctttttcacactgtaaagacagcctgttgatttaagaagcatacttactgcttcccgggctggatgctgtttttcatctttcttctttatctgaagatgttctaatttccttagatgtaagaggctcacctgcctcctccaccctcctcccaacaaattgctactggagcaggagagttgcagccacactttttgacatcttgtacttatatattctacccacaatcatcccagaggagaaaagtaaagcctattgcaattctagagttctcagatttatgatgatttttttacacaaattctgtattcattcataactagtatttccacaatggcctgtttaataattggcattgttttttactttgtgtgattttataattcaataagcaggttcatcaaattagtaattattgattgtgaaattttcagaacagaaagctaaaatcagatctagcctctgttttcttccgcattttatcaggttttttcttattcttggaagaggtccttaaacactcctaggcagtagttctaaagagcagtgcccatctgtgtctgttgacaatgtcatcattaacaactgttatagggtgggtctgagctcagtattgtcatcattgagattaaattgccagtgaagtgaatttcttcctgaggaaataatatttcttaatcctgagatacagtcagaagccatgagttctggctttgtctagaatttaccatgtaatcctagaaaatctattttcagatattccctactctttaagatgtggatagtgagaccaaaccatttctaaagtccttttccagatacgaaatctaacataatgtttagaaataaacagaagtttatttgtttgcaaattttaactgtataagccgaaatctgtttcctttttagttatggtatcatattttcaaggataccagaagccatgtagagtaaagctagttaaactgcttccagtgatcatgtttgtgtatgtgcttttaggcatccttaaccttgagtttttatcagtgttccctcccaaacacatcctggtggattattggactgttagcatcgtagagagttgttgatgtctgaaagttttggagaaaccgtgacttctgacttgaccacatgtttacagcagggaaaataacactgttacttaattacagccagtctccatggttagatgtgaaggggtgagagagagtaattactgtytagcacttttctgtgtagatttcctctgggcactcttggattatgggaatccagatgggggaaatgacctggctttgctatcttattttccccagagcagcatttaacaattgcttaatatgggaactattatgtatgagcacttttaaccccagtggaagaaagcaaggtgtttatgcccctagggaggtggcaaaaccagagagtaacacaaaatttcatatcctgacaaaagcctttggtgttacargtgcagagctgattttgcctcagtgttgccaaaacatcaggtacagctcagtttcaccccagatagggttcaagtgagttctgttgtgtcttatcagaagaataaggcttgaagtttcctgatagtataattcctagctagttctgggtattccatgtttgtaagaaaattataattaacacttaaaaccgtgcatcagaatttaattttaataaattttctttgatttccctgaaccttcgccccaaattggattcatgatgggcaataaaatagatttgtacatagttgccaatgatgattatcttgtagaaatcaacttttagttaggaatgcactgcaaaattattagattatttcattagatctttttatgggacaattacagtaaaatgtaagtgaattgtgatatcatttgtaaatttaacttatgacaaaccagacattttactgtaaacattagttattaaagtatcatttcagctaattgcttcttgtagggaataagtcagttttataatagttacttgaatacccggaataggtaagcagtttctctgttcaggggccacaaatctcaatagagtgaagattctgggatacagtcctaagtgccatctttgtaaaaaaaaaaaaaaaaaatttagaccttttagaataagttggatgaggcttaacaagatacagtctataaaaagaaattctgttaagcaaacaaaatgcttttttgtgtggacaaggcatttaattcgtattaaaaacatcatttgcattttccctttaaatgaaaaataagtttttaaaagcaatctttatatatgaatatactgtgtgaataactttacttgacagtatttggtttagctatatatttgctggaaggatcggctacttctttaaccccaagaagagactcaccacgagaaatttcacgattatcataatactatcccccaagatcttgctacagccatgtttatcttactgctcaccatgacttgtgataaattctagtcaactccattcatttatttatctgtatatctcaagtgttgatgtatgtgacactttgatagataatgcaggtaaaaaaggcaaaagttcacatgatttcctcctgcctaaagtgtatagtctaattggcacttagtggatgctaattaagtaatcatacagacaaatataaagtcctaacacagtatagaggtctatgtgaggctataatgggtggtttgatctaaacagggaaggcaaggaaatatgccctaagaaagtgattctggagttgagatctaagaatgaatttgattaagtgaagaacttaccaggtagatgttatagcactggcacatacaaaggcaaaaagccagataccacgtagacaccagagcttctggagcagcaataacagggaaacttgcatataggatcagtggcaggtttgcaggccacctactgctcatcgggctctaggtagtgctcagcattcttccagggctgcgccagagttgtgaagagggtctctggcacttgagctctggagcttttaagctgcatgacttgggaaactttatcccctgtcctggtatgagattggggctagtgcagcttggcaggaccatgcacagtgttgcttggttagtaccaggcccttccctggcacagtccatgggctagggtccaagccttgaggctgatctgaagtgattgctttaaacatggagttgcagccagtttccacagagctttgcagcatgccaactccttttcttggagtccagcccacaaagggcttgattagcccttcttcttaagcaggcacaaaagccctttggtaggagagagaatagtgagttaaaagggaccacctccattgtgattggagtgatatagtggatactgcactggaagcaaattaatgttttggtagtggaagaggtgccttggaatgatgaagtccctgccttggctgggttgatgaaagattgaacttttaggaagtgaaaggatcccatgagtttttaacaaagtttattgtatattcgtcaaaaataacagtgacttttcatttgtactgaactctgcattttaaaactccatgtctaataaatttacaggaaaagtatatgattatattatgaaagaaatggaaaataaaaaaatctggtctgtcatgtattatgggccccttccaattgaatacatgactggctgaaatgaagtacatctatcagactttcctagtgttcagatgagcgaatggatgaaattaaagaagatattaatgaatatgtttcctgtttgaaataaagagtgttttaatgagtgaaatagtttaagtgaaaattttttaatatcatttaaattcttaaactaaggttccatttaattatagaaatgcargtaacttttactttaatgtacctgttgaagtaaccatcatctcgtggtagccaragttacttctaaaatgtatttgacaaattttattagtgtgataatttgtttcaagatattagcatgtttgttaccttgaaacactttattctgattatataacacatatgattaattttccattggctttagcatttcaactgctaagttgaaataattcctactgaattatgaactttgtgaataaaatcagtaaatgttctggtgaagaggcaaattggctatacagttacaggataactttgtaaacctgctgagctaccatgaatcattatgttctatttgctgtactaactgccattctttcagattcaactaaaagttcattttgttaacttttcagtgatccatctttttatacttcccttcttcgtggttttatgtttccagcctttctgtgattatttttcctctctttctgcctctcttcttgctttctgaagccatgtccctgaacctgaggattatggctgctctcctgatgaatggtaagctctatggaactttctgcctcattgatccctataaaaggtttgcattttattgttttgtaagacacatttcactctcttttatataaatatatatatawaaataaaatattgctgagcagttagggtaacaatgctgtaaagtagatatttcttgaaatctattgaatattcctgatttttgatggagaaacatgtagtttatagattaggtttgccagagttttacattgtttatctrtaataaagtctaatgatcaattccagagtgtgggctttggactacctcaggtttcagctacagctcctgaagccgtcaggtttttctagctcagtactgccaccttctgccgctacttatgtactttacagagctaccaaaagaggctactgaaacatacccaagcagtggaaattttcttctgtgtttcttacgattattctaataagtctgtgtgcaggctatgaagtgaacgtttttaaaatctgcaccaaatgttagaaaactatgctaccaagcactagagttaactttagtatatttaattttggcatcattaaagwtagcgttttatgggtttaatttcactattttatgagttttttgttggttttaccttaaaattcctcccctttgtgaatttatattttcatcttggatagtgcagatttattttgatatttctataattcatcatgagttggtgggcaaatgaaatttcaggaaatatgttcctttaatgttggtaactttagaaaacattgagaatttataggtcattccatttttattttcatattactcatgtatttggtgacgaagccacattttcaatatactttgaagtcgaataacatcatttaaatatttttcaacagggaatttatttcagtgaagtgaagatttggtaaaaattttcagtaaatctcacaacacctagggttaatgacaggcagctgtttggttcttgtgacaactgatgagacaccacatgcccattgcttggagtgtcgtacattttgacacttacacacaagtaatttttaatatttttaaatgtaccaaagcatcttactattagtggataattcaagtttaatattgtatatattccctcttatttaatcctttgagaagtagttaaaatttcgactatatctgcttttctataacattaacataattctattaattttaaatattgttcattagcatagaagtgatatatatatcctctaaaataactcagttattcctaagaagaaattgccttctccatatttttcttaatgttggaaggaaatgttaaaaattgatgtttgtttactcacgtcattcaaaatattctactttcaatagaggttgtttcataacttttattggtgctggaaagagcggatgttattttatctagtttagtaagttctttttgtaaaacacccttttggaaaacttgatattctaaactaggtaactccaaataagaaattgtcagctttgtcataaattgcttgtacatttccacttatagttacatataagcttagatagtaatgatttttaaaaataacaatagggaaggctttcactaccgttacagtaaagtgagttgtttgttaagagggagtctcactctatcacccaggctggaatgcagtggcacaatctcagctcactgcaacctccacctcccaggttcaagtgattctcctgcctcagcctcccgagtagctgggactacaggcatgcaccaccacacctggctaatgtttgtatttttagcagagatggggttttactatgttggccaggctagtcttaaactcctgacctcaggttatccgcccgcctcagcctcccaaagtgctgggattacaggtgtcagccaccatgcccagcctcaagctttattttaaatatatacttggattctccatctataaaataagtaattacctataggcctgcaaaaatgaaagaacaaatgtttcctgagctgctactgtgtccaaggttacgtggagtgatcaaagatgtgggctttggatactaagcaaccaagttcagattttcattctactggtactgttgaacaagttactcaactctttgcctgaatgtcctcatctggaagaatgtagataataatagtagttgcatcatcaggaggttttgaagattagatgagctctgtttgtgtagtgctttggatagtgtctgcacatagtcagcccacactgagtgttagttctggtgctctcacttaatcctcatgacatatttgacatggccattttaaagttggtgaaattcaggcaaagaagcagtttgccccaaattataaaaacgagtagatgatgtgagagttgaaacctacatcagcctggttataaaacagtactggttacattacatcctatggactctaagtaactttaaagaatatctgctttttagatcacaagatatccttgaaatttcagtcattttaccttgatatttctctttttcatttaatatttttcaacctagaatttctttcagtaaatttcttgtggtgttaggcaagagcagattaagcaggtaaaatttaacaagtttgtgtaaagttagcatgagggcatacaactttgcacaactttgagcatttgcccaacctcatccacttggtttcacattgccaatgaaaccaagatcaaaagtgtgatcccagttgaatcctgtgctccaggcatctgactgcatcttcatgctgatcttcaggagtaaagagtatagatgactctataaatccaaaatctgaaagggcattccaatatggctgttcagcagcttcagtttcatgtaaagttcattgaattccatgtataaaacccatgagcttatrtgtattttactgcccgacttgaaccagtattcacaaaaatgccaaattaaaaaaacataattacctcttagatatatgtagattacatatttacatttagttgagtttgaaggcaaacctataatgtattaagtctttccacatattctgttaacattaaagataatcagatgatggttgtagctctactcgcttaggtgtattaatataaatagtttatagagataaaactatttcccaaccagtagctacctactgcagattaacctggttttctcatcattgccaagaaccatcagctagcatataacctcacagattaattcctttttattaaaaatctactgctctagattgatagtatcaatactttggattgaaggggaaaatctatttattcttaacatcaatgtagccctaagatatgctcattttctaaaactatatatttctataattattttttatcattttctgtcttctgttgtggaaaattttaagcatgaacaaaagcagacagatgtactgatccacctgcttcaataatatgcacttaagaccagttcatttatgcctttcccccactatcattttgaagcaaatccaaaataacatattatttgttttttctcaactgtttaatatagtttcacattattcttgttgataattgttcaagtaaatgctagtgagggtgattccccagaaggatcaccttaaagtgttctgtgcttagtcatttcactggggtttttagtattatcacactatcagtggatagtactacactgtattttctatcctctggtcttatttattttctcatttcattctggtctgtagttatgtatgaagtgagtggtattcatttattctgccgcaaaagctaggctcactaaaacattcttccaggtgtgactgtataacaaagagatctgacacatccaaattaatgttagtcttcaaagcagtcaccttggcagatagtttatttattccagtaaggcagccatttcacagaatgtttttgaaattcctcttttgtaattgcctttagaaagatgttgagtcacatagtgtattagtccgttttcaagctactgataaagacatacccaagactggacaatttacaaaagaaagaggtttaattgaacttacagtcccatgtggctggggaagcctcamaatcatggcagaaggcaaggaggagcaagtcatgtcttacgtggatggcagcacgcaaagagagagcttgtgcaggaaaactcccccttataataaccataagatctcgtgagacttaattcactgtcacgagaacagcacaggaaagacctgtccccatgattcaattacctcccaccaggtccctcctataacacgtgggaattcaaggtgagatttgggtggggacacagccaaaccatatcattccaccccggcccctcccaaatcttatgtcctcacatttcaaaaccaatcatgccttcctaacaatyccccaaagtcttaactcatttcagcattaactgagaagtccacagtccaaagtctcatctgagacaaggcaagtcccttctgcctatgagcctgtaaaatcaaaagcaagttacttacttcctagatacaatgggagtataggcatgggataaatacagccattccaaatgagagacattggccaaaacaaaggggctacaggccccacgcaagtccagaatccagcagggcagtcaaatcttaaaggtccaaaatgatcccctttgactccatgtctcacatccaggtcacactgatgcaagaggtgggttcccattgccttgggcagctccacccctgtagctctgcagggtacagcctccctcctggctgctttcacaggctgtcattgagtgtctgcggcttttccaggtgcatggtgcaatgctagatccactgggatctagcattctggggtctggaggatggtggccctctgctcacagctccactagggactctgttggggggggctctgaccccacattttccttctgcactgcgctagcagaggttctccatgagggacccacccctatagcaaacttttgcctggacatccaggcattttcatacatcttctgaggtctaggcagaggtttccaaacctcaattttccccgccccgcaaccccagacagaattctgctgtcttgtccaggctggagtgcagtagtgcaatgttggctcactgcaaccttttcctccttggttcaagtgattctcctgcctcagcctcccaagtagctgggattacaggcatgtgccaccatgcccagctaattttaagtatttttagtagagacagggtttccccagttggctgggctggtcttgtactcctgacctcaggtgatccacctgccatggcttcccaaaatgctaggattacagatatgagccaccacgcctggcccaaacctcaattcttgatttctgtgtacccacaggctcaacactgcatgaaagctgccaagacttggggcttccaccctctgaagcactagcctcytttagttatggctggagtggccgtgacacagggcaccaagtcctagactgcacacagcatggggaccctggccctagcccatgaaaacattttctcctaggcctctggacctgtgatgggaggggctgccatgaagacctctgacatgccctggagacatttttcccattatcttggggattaatattcggctcctcgttacttatgcaaatttctgcagtcagcttcaaattctcctcagaaaataggtttttcttttctatcacattgtcaggctgcaaattttccaaatgtttatgctctgcttctcttataaaactaaatgcctttaacagcacccaagtcacctattgaatgctttgctgcttagaaatttcttccgccagataccctaatcatctctctcaagttcgaagttccacaaatctctagggcaggggcaaaatgctgccagtctctttgttaaacataacaagagtcaccttttctccagttcccaacaagttcctygtctgcatctgagactacctcagcctggaccttattgtccacatcactatcaggctttagtcaaagtccttcaagtctctaggaagttccaaactttcccacattttcttgtcttcttctgagccctccaaactgtttcaacctctgcctattacccaattccaaagtggcttccacattttcgggtatcttttcagcggtgccccactctactagtatcaatttaatgtattagtctgttttcacactgctgataaagacatacctgagactgggcaatttacagaagaaagaggtttattggacttacagttccacgtggctgggtaagcctcacgatcatggcagaaagcaaggaagagcaagtcatgtcttayatggatgccagcaggcaaagagagcttgtgcaggaaaactcccccttgtaataaccatcagatcttgtgaaatatattcactgtcacgagaacagcacaggaaagacctgcccccatggttcaattgccttccatcaggtctctcctacaacatgtgggaattcaagatgagatttgggtgggaacacagccaaacaatatcacatagaaaaccaggcctcattactttggtcaaaaccagtatctaacaaaaatattattattgaattcaatcacttgctcatatttttggactctactttggactttactttgcagccagttgtaccattgaaaagcaggaggtgcagaactttcccccaaaacaatgctttcttagccaggtcccaaggccagaggtcccaggagcagcagcagcagcagcagtgggtcccccaggagarcctctaaggtcacacagggtgcccactgcagacaggctatagtgcatggtgcctcctccctgacaaccacctccacttcacaccagccacagcaaggaactttggcaccagcatggatctctgcctgctgccgatggcatgactgtcgaacaggtggtgttccatcagttctttataccaagtcctttgtgaagcattccacagagcatgtgtcaatggcatgtgttcacccgacctccaaaatagaagagactccaagacaaataggagatatcatcagcgtgtttcatcacctctgacatctgagagaaaaaagaaacctgagcctctactattggatcaaaattacgttaacttaaagaaccagattataaaaagcagaaagatgagggctccaagagccagacttttgtcacgatacccaccattagatcatcattataataccttcaggtgttacagtgttagtgcaactaacacctggcccatacgtcatggaattgcacaggagggcacaggaaagcctcatgaatgtcttaccaaacagggagagaaatggaggcagagcgggagctaggagcagtttttaggtccctattgagatccactccttccaagaggaggaagagccacagagctcagctccctgcaggtctaagtcaaagagccagtgacttctgttgagatgagctggtggtgctccctacagaggctccctgtgtccaaggactacgagccccctacaaaagtctcacaagtcttagagacagacctcatccaattcatgaagccactcattggagtgggcagataattctgaaaatacaataagaaaagttgtaactacagagatcagtttcagggtggttgaggttgtgagtgggccatcactgtgagtgggactactttgggaacagcagacatcagagggtaagccaggggtcccagagtcactagctgacctcaggccttttcccagagggatgtctggagggctgcctacctttgagccattggcatgtmcacctcagtgtgagtggccccacattacaactctttctggaaaaggttattgaccctggaccttgtgatgaactttgaaatggaattgaggagaccataagtgctcttcaggccggcccgaggcccagtgcgcacctgtcccagtgcgcggcccacctgagcagcagccgtgcacacgctggataaaaagcaagtgcacttgtcctcgtttgtgtggcttggtgctaacaagctgcctcttcactcccaaaccaatactcaattacgttaggccaataaaatggctatattcgcttgaatttacatatatatgtttcagtggctcgcaatatgagaaaaatgatcttaatagctccattatctatccatgttataaataaacatgtttaaaacaagttaaagctacatatgagaactcagaacctgaattttccacttaaaacttgttaaatgggaaaaatattaggttggtgcaaaagtaattgtggtttttgcaattgttttttaatggcaaaaatctcaaattacttttgcaccaatctaatatttagatctgtgttgaaaatcatagacttttctctgtgcaacctaagtgcaggctaccagctcctaaataaagaaattccctgtatgtgcatgttatgtagttaaacaattctgtctactcaggacatttggaatgttaaagaattcgtaatttgtcattctgcttgcttaagtgttcaaatgtgtacacaaccatgagttcccattctagtggtatgtctgagctgccctccctgttccttactcattaaagtgatgaattttgtaaaaacaaaacaaaaacccacacaacaaaacggtgttattttaaagttatcctgcttttttcgtgtgtgcatgagtgtaatatgtatatgtgtataatgtgcatttagtgtatagatagggtgtttatttcagatgactgatgggttttgtacttgttttaaatttgatttttttaagttcacaatgcattaacatattacaaattcaaggagtgtaaaagaaaaggttttgatcccctccctgtcttagagccctccatttcccctgccaaagacagcctgtgtgactaatttcaagtgtatctttaccgatctcttctataaatattcatacatttattttttctctcttatttttacagaaagtgaagcatactgtacacactgctttgcaccagcttttcatttgacagtgcatctctgagattttttcatattccataaaaagcttccctttgtttgtaaatgcaccacagtatttttaagcagcactactgatgggcctttgtgtttcctaactctttgctattaaaactggactgtaggggttgggtgcagtagctcacgcctgtaataccagcactttgggaggccgaggtggatgaatcacctgaggtcaggagttcaagaccagcctggccaacatggcaaaaccttgtctctactaaaaatacaaaaattagccaagagtgatgacacatgcctgtaataccagctacttgggaggctgaggcaggagaatcgcttgaacccaggaggtggaggttgcagtgagctgagattgtgtcactgcactccaagtgagccaagactgtgccgttgcactccagcctgggtgacagagtgagaccctgtctcaaaaatcaaaacaaaaaacaagtactgcaaagtataaatttgtacatatagtattttataccagttaaacaatataaattcctagaactggaattactgaatcaaagtattttaaattttaaattttgcccaattgcttttcttttagaatttgtatagtttatgttctcaccaatgatacatgctttactattttcctacaattacaacagcacaaagttgtcaagttttatttttgccacaatgatacatttaaatttcacctctctcattatgaggtaaagttgaatgtatatataaagccatttatatttccttccttgtgaattgtgtgtttatatcctttgctcattgttgtactacattgttgatctttttgtaaattgatktctggtaattctttttattccatggaaattagcctttataagttggaaatattttttcccagtttgtcatttagcttttgacttttcttgcagaagttggttgtgttttgttttgttttaagagatgatctccctctgtcacccaggcaggagtgcagtggtaccatcatagctcgctgcagccccaaactccagagctcaagggatcctcccacttctgcctcccaagtagctgggattacacaccaccagctggtgcataccaccagacctggctaattttttaattttttgcagagacaggtcttgctgtgttgcccaggctggtttcaaactcctggcctcaagcagccttcctgcctcagcctcccgaaagtgctgggattacaggcgtgagctactgcacccggcctgttgccatagtttttgctatgcagaaatatttagatttatgtagtcagatttatatattatgttttctgaattatatatgatacctaagctttttccattcctaagttttttttaaaaaaatgtttcacatatctttagtacatttataaaatcattgatccatctggagtttattttggtttacaaggtgaaaagtatggattcagctcttttcttccttttctctgatggctctcctgttgacatgaattttgaatttaaaaaaaagtcttagtacatactgtcatatgcaaggacaactatactgattaagccatatattctttgaatattttaatttttattgctatagagattcttcatttttgtttgatcagaaaatgagtagttacaatgtatcataacttttaagtcagcctaaagaagctgcaaattatatgacattgtgggttccctgctctgttctccttaccttaactgtgatactccctgccttattgcttcttgcaaaataccataacgtcattgtctccttgggagcaaagtgacactcaaaaattactaggcaaagatgtaaccaaatgttgatgttggcttgcatttttatttgtgaaagtttgactaacagtcctattatttttacttttaatgtgatggttcttatttttaactgatatgagcttgcaaattttatctgtttatttttactaaaagtaaatattttgtaaaattttggagaggagtggtggaagctccatgccagagttatccaacccaggctgtctgattagaggatgagttgtttctagtttttgtttctggtttttttgtttttgtttttgtttttgtttttgtttttgagatgtagtcttgctctgttacccaggctggagtggagtccagtggtgcagtttcggctcaccgcaacctccacctcccaggttcaagcgattctcatgcctcagcctcccgagtagctgggaccacacctgactaatttttatatttttagtagagatggggtttcatcatgttggccaggctggtctcgaactcctgacctcaggtgatctgttcacctcagcctcccaaagtgctgggattacagacataagccatggtgcccagcctgttttggggttttttaaattatcttgggaaggaagtcactttctagaagaagagttctttagcattatccctgacagaactttcattactgaatggaaaatggggtatgtccatgtaaatatttcaattgcatatccagagctactcaaatataaatatgtttgaaaattaagtcaattatagtaactgatttataaaatgaaagaattattggtgagattaataaggcatatcttcagatttaaacggcttttagtctggaattctttggaaagaaaatagacttcttgcaagatgttactgtgaatattccttgacatttgtttaacaagtagaaaagtacagctacaaaccatttatgaatatattttaataggaaaatttcataaagccccaagtaatgaactctttttaattaatggtgatatttggaggataaatatatgctatctttttcttagatttttttccttccatcttcaaaattagagaaataatgatratgatgatgatgacgtgttcactttggcccccaagggtattttgatcattctaaactactacctgctaataaagatgtattttcttacgatttggagacttaatagagcaagttactacatgtagatatgtgttccattataaacattctaacttcctccttaagtttactggagaaatgtgtttcattgaagatactatgtatgttctctcctttcaaattctgttttcttcaaagagttttccgtcctgtcaagctgctgcctttacaatatgacagtcttgatatctgacatgttgacattgataatactctttgtaacctgttaatgttgtgatcaaaagctttctggattataattgtttagtattggacacatttttttccctcagtgaaatctgaaattttcttctgtgcactaaacctcaaatgtatatattttcactaaattttgcaaactatacccttttcttttgacattcccacttgtgttccttgtttttcctttgaatctcagtatttttatgttaaattgtatggccgtgagataaatgatagctagtttgcagagataattgactccatttatatcgtatgaagtacataatacatttgctcatctgaagatagccacaacacaaaaattccatacttttattatttgttcttatatttacagaacaaatgtaatatgtttataaatatttgctcagatattaatgatagatgttgatataatctgtaaatggtttattcatgttcttatatttcatatggttttcatcactacatataaagatttctcatgactcaaatagaagaatattttgtataatagctttcgttaattcttagaatcctaaaaattgaaaatattatggaagtggaagaaattcaattccaggtgttttaatagttttagttttatatttttacaaattttatgtggctgcgatataatttaactccagaaaaaatgaactgtaaaatactatttttcattacactgcaaacatctttcacattttagaatgcttgaatatattttgtgatacaatcatgaaatctgtgatgtcttacttagaaatgcaggccaaattacatttaatttattgagggtttggagacataacactttactcataaagtacattaacaaatagatcagtgggctggtataaatgaactgggtttactctattttttacccccttcaggcagaactcacagtttggagatgaaaaaacatttagtgattcatcattgctggaaaatctccaaaataatcatgtaagttacataaaaccattgtctttttgttagtgaataaaaactaatgaatgtttctctgaactatcttctatgtttacatgtttctctttttttactttcatgatcttttatttatttatttagttagttagttagttatttgagacagagtctcactctgtcgctggggctggagtgcaatggcgtgattttggctcactgcaacctctgcctcccagaatcaagccatttctcctgcctcagcctccccagtagctgggattacaggcactcgccaccacacccggctaatttttgtattttagtagagacagggtttcgccatgttggtcaggctggtcttaaactcctgacatcaggtgatccaccccctcagcctcccaaagtgctgggattataggcatgagtcaccgtgcctggcctcattatcatttttaataattatcaaaatctatgccaaatcctttttacttggccaacattaattcatggtggttattaatttgattttaatattatcattcatcaatattctgtcttttcaaattgtttcattttaaatgattattgaaccttctgtgatacaattcaatattaacaattttagaaataagttatcgaaataacttatagaaataagttatctgctcagtaccataggctaaatatacaatagaaactctggcttctgccacccaatgtgaaaatcctgcttatgaagttactgactgtattagggttctctrgggggggcagaactaataggatagatagatagatagatagatagatagatagatagatagatagatagataagatagatagatagatagatagatagatagatagatagatagatagatagatacacacacaaaggggagtttattaagtcatattaactcacacaatcccacaataggccrtctgcacactgaggagcaaggaagccagtccaagtcccaaagctgaaaaacttggagttcaatgtttgagggcaggaagcatcctgcaagggagagatgtaggctgggaggctaagccagtctagccttttcacagttttctgcctgctttatattctggccacgctggcagctgattagatgatctgccttccccatcccacttactcaaatgttaatctcctttggcagcaccctcacagacacacccccaggatcaacactttgcatccttcagtcaagttgacactcagtattaaccatcacactgacactcagttttcataagatcaagttatagagtcttctggagttaaaccccggaactttttctcataaccacttcaagcccagtatgtcccaacttgaactcatgattgttaccctcaaatatgcatcttctctagcacaggtggacttgtcacttttgcccaagtggggccctatcagtatgttgctaggggtrtttttgtatctctcttttctgcgcgagccttcaacaaaatattaacttcaggatctacaaagcctagccctagaccacctcttccctcttggattctcagctttcagtaaatcataccatcacctatcttgtgactcttcttaggaattagagggttgtctttgatgccttcttttctctccatgtccagatctctgagtcaccaagtccttgttggcactgattgctagaatctatcttgggtgtcggctgcagttaatcctcattttcaccaccccagtccagaccgccagcacccactctgtggattcctgtggtagcctcctggccagtctcctgggttccatttttactcttctccagttattgttgcccatgacagctgaaaaatgcaaatggaaatcaagtcccctcactatcctgtttaagcctattctctgcgttctctcttcactcataaagtaacatgatctggcccctgcctaagctgtcaccctcactttgagctcctttctcctcatcccactggctgccttttattttctaaaacacatcgtttttttccttctttacgacctttcctgcttgatggaaagcactttgctcaattcttcatgaggctaaaacttcatcagctcaaatattacattatcttgagaataaccacagactcgctcaagtcacattacatgatatttgcatattcccttctttacagtgcttgtcttsctataagtaaacaatacgtgtatatttatttgtgttcggtcttccccacaacgccaagcttcacatggcagggaccatgtctgtttagtccactgttctagcttgaacacagttttttcaaataatgttctgatrtatctccctagtcacttcacattattattttttttttgcccaagagcatagagaaatgtttttcctttattaaattgaatgacatttctctttattgagagccagacaggaagatatgtaatttaaaatatctggcttctctcctataaaccctaagctccgtgcagaaaggatacacccttctgtcttctcaggctgtaagagtcccctgcacataggagttgttcataattttttgattcattaaaatatgaataaagttaccatttttggagaggaaagacaaagcattatagaaaaatcctcaatcattatcaccccaacgcaaagtataaccccaatgcagtaagattgcatgcctaaaatttaaatctgatcaggaattacaactaggtaaatgaacatcttcgaatttttatcctgtcctccaacgacaagattcagctacatctgcctttctcactatactatttctatttgacaacaccaagttgtcttgtataaatgtttagaaaaggaatgaaagagtagaaaaataatttgaattaaaaaacacattttctttataattgatgttggcttcttagttggctataatcccacacccccagtgtataacagctatgtttttatggggttttgtttgtttatcttgtttgttttgttttgttttgagacggagtctcactctmttgtcctggctagagtacaatgttgcaatctcagctcactgcaacctccgcctcccgcctcccgggttcaagcgattctcctgactcagcttcccgaatagctggcattacaggcgcctgccaccacgcctggccagwttttgtattttcagtagagacrgggtttcaccaggctggtctcaaactcctgaccttaggcgatccacccgcctcggcctcccamagtgctgggattacaggtgtgagctaccatgtctggccaacaactrtgttcttaatagacrtgaagtaatattactgtcagtgtcaaaatgttcacatgagaagggcttaaattatgtgtttatttttcacagccaactgcacctataatatgtgaatttcttacaatgatggcagtctgtcacacagcagtgccagagcgagaaggtgacaagattatttatcaagcagcatctccaggtacaaatgaagcaattgtaaagtattgttttgtggaaaattgttctgaatgtaaaagtcaatttaattttaaaaagatagccaaattgagtgttttttagataaaaatttttatttaccaattagaaaaaccttggctttcaaggttaaatatgtacrtgatattttaaaatgtgtaactttgtatatgtaatttttggcatattacataagttacatgaaaatgtgaataacgtaattctcataagtgaaaaatgtacttttttacatacacataataatttttcgcttctttataaatacctaagaactcttagtcaagctgattttgcacaggtacaaataggaaaaggaagaagtgttcgcctgaatatagtaagcttatataactttagaacaccaattttgccttcctcttttgttaatgataataaagaagcttgtgtatttatttgggtgaggaaagttttacgcatttgaagggattccataaaatattattagtacagttatcagtattaagtacttaggcttaattttagatctgttttcaatgtaaagttgggcagatagtcagtttgatgagaactttgttagaagtgttttaaactgcattctaagccagcatctgtgacttataggatatactaacttccttaaaagcataagaattgttatgtctcatatcattagggtagaaactatgtgatgttttcttatgccataccctactctagcaataaaaaggttttatttaacatgatgaaattcatagacattaaaatcattagttcatttaaagcttgtttaaactgaatcctcaattagcaatattagtttctctagactcaacattttaggaggaaaaggataaaagtttagaaggcaattttctctgattccttttgagaaagttttctagcaaatacactggatgaaagggtacatttaaattaagcttcttaggaatttgtgactaacagtgagacttgacatttcggaaatgtaactctgagttctgtatgtgtctccaacacttaagatkattatcctcatttctttggaattgtcatgtaattttaaaataattggattaataacatgagccagaataaaaagaactttaattaaacagaaaattatattaccttaatgtacttctcttgtgctgagaatatttttttttcaatcatgtgtttgcttttacctctttttctaaaacagatgagggagcattggtcagagcagccaagcaattgaattttgttttcactggaagaacacccgactcggtgattatagattcagtaagttagttgtttttaaggttctttttaatccaagtaatacatttgcatagcttcaaagataaagtaataccaaaaggctcatagtaaaatagaggttccccactccagaagcaactactgggtgttcttttagctatttctttaggcatttatacatctcatattttcaaaaaataaaggtgactattaatacatgttttgactcttcaattttaatgtatcttctgattctgttacatgagggtgtatctcttgaatcaccatccttttagtttatccttcctcatactcaaattattatgattttattccaatttttagttaaatactcaggcccaagttttaaagtgggcaaaagacttgagccaacatttcacaagagaagctatatggatggccaataagcatgtgaaaaaacattgttagtcattggggagatacaattaagaccacagtgagatggcactacatacctacccaagtgattctcccacctcagcctcccaaagcactgggattacaggcatgaaccactgcacctggccactttttcttttattttctaaagactaaattttaaaaatggatagcaccaaatgttaatgagtgtgtagaacaagtgggatactcatatactgctagcagatgtgtaaagtggtaaagtccctttggaaaaccttacagagttgtctaattgaggtaaacttacacctgagccagcaattgtgctcatagttatatagcagaaatggaagtttctgtttctaaaaagacttgkaacaaaatgctcctatcagctttattcagagtagccaaaaactagaaaccaaaccaaatgcccatcaatagaagaatggataaacaaattgtgatayagtctcacaatggaacatctaaacaataaaaaagaatgagttattgattcatcaacagcatggatgaaaaatgaatcaaaacatgaatcaaaaacattatgccgagcaaaaaaaaaaaaaaaagccagacacaaaggagtgcatcctttttaatttcatttttatgcagctcaagatcaggaaaaagtgatttatggtgatagaattcagaacagtggttgcctcagggcagggaagaggttgattggaaaagggcacaaggggatttataggatgggaatattttatatcttgattggggtgctaattaccacactgcacaattttcatttgactctgtgttaaaggtctgtgcattttattatatataaattgtctcatttaaaaattattatttagtttctgtgtagtattgccttctattttacctgtacagtattcatagctgaacatcgttgtatttggtaattatttttttgttttttaaattttgtgtttcccaacaccaattattttttttagagatggggtcttgctctgtcacccaggctggagtgcagtggtgcagtcatagctaaccatagccttgaacccctgggctcaagtgaccctcctgcctcagcctctaaaatagttgggattatagataggcatgtgccaccgcacctgatattttttttaatttatttttttaatagagatggggtcttgctatattgccaaggctggtcttgaactcctgagctcctttgattctcccacctcagcctcccaaagcactgggattacaggcatggccaccagacctggccactttttccatcattttctaaagataaatctcttacctgtttgtttcattgcttcccttttttcccccctattatctatattaattgttcccatactttctagtatacttttctcaatacagtcacaccacataatctgttcattggcagttctttccttacgacatcccttttgaagccctccattctcttgyctggacaggttatattctaagaactcttcggtgacactttttggttttccttttggttttctcctgttttggattttctgtttcctgtaactcaatttacgtaaaagttagtaagctcccttccatatttcagcagggaaaatttktttgtgttggcattttttacrgtaaaattttatggctaggatttatttcctagaagcttaagacttttccaactgtatgtaattatatattccttttcttcttagctggggcaggaagaaagatatgaattgctcartgtcttggagtttaccaggtaaaacatctgctcagtgatttgtatggataagataaatttatatccatttttattttttcycttttgaataactagaaagtatgttttgtttttatttaactaaatttgtttagacaaaatattaaatcaaaatctttagtacattttttattctcattatctgtagataaattacaaaccactttcttcagagtattgcaatgcgtgactactggttgcagttttaaagtctttttgaaagttgatctcatggaggtaaagagtagaatgatagataccagaggctgggaaggatgtgtgagtgggaggggaagggataaagagaggttggttaatgggtatgaacacacagttatgttgaagaagtaaattctgatgtttgataataaagtagggtaactatagttaacaacaatgtgttgtgtatttcaaaatactagaagagaggacttaaaatgttcccagacatacaagtattaaataatcaagatcttgcatatcccaaacaccccaatttgatcattataaattctgtgcatctaacaaaatatcacatataccccataaatatgtacaaatactgtgtatcaattttaaaatttagaaaaagaaatcgttttgaaatatagctgcctgattcacaagcccagcgtatacggccatgcgtcttatggctggtgatctggaaacacaattatgtttagaggcatcagatttatgtggggtggagatgagtcgggatcaggaagccggcattctaattgtatgctcattatatctaattgtcttcaggatttgaaaaaccgtattcttgtctctgttaagtataagaccagttaccatctgttaggaaaggacagaaagcaaagtgattgtcctacttattttatttcttaaggtcgaataatagatcccttcagttataatcagtgataagcctgtgagttttcagcctcttactcccacgtgacaatgtaacctgcttacctgcattcttgaggcagagaggcccttgctgcagggtctttaaagactgcgtgaccattcacaggacacttcacagaattaaggccatgaggaagtaatgctgctgctcaaggaaataagtgtccatcatttttcttgaactttcttctgcataagacaaacttgtacattgcttaggaaaggcatttctctttctgtgccaacttttgttgctgtcttgattaggagtgaccatatgccagtggttaataacaaaaataatgcagtctgtctgacttattatttaaagctttttttaacttagatactctgaaaagcccaaagaagatgaatacattgaataaacagaatggagtattttcaaagtgcactcctcgtctctttcttttcatgtcagagtgattgcttttcccaagcttatttgtattatatctgtagactgtcattaagtagtctattaattgccatttagatacgttttttaaaccacacttagaaagcactatgctaggtgatgagtgccatgaagaaaaaaataaagcagggttgggagtttctgttctttcaggactcaatgatgaaggtgggtttaagaatgaacatgagaaaagtgaatatgatgctgttaaatmgtccctatgaaagacattagtggtttagactaggatgatggtagtgaaaataaaaggaagttaatagaatccgtgtaccttgtagaggaatatctgagagactttgtgagggattggcagtagaaggcgaaacgaggaaggggtgagggtctctggcatgaacaactgggtagatagaggtaccatttacacagatggcagaagtgggaataggaatagatgtggaggttgaaatgtttgaagtcttaggttttagatgactgtgagacatacaagcagagctatcaggcaagcagttgaatataagggcctgaaacaaaagagaaatctatggctgaaatagcaatttggcagtcagtggttggtaagtggtatttgaagtcataaaactgaatgggatctcctgaagagaagatataaaatgagggggaaatggaaggctgaagattaagccatgagggtaagggttgattagaaaaagaggaatcagcaaaagagacaaccttgttgttaaagatgtagaggacagagagagggtcatagcacagagccaggagaagaggattcaaagagagagtggtcatctgtgtcggagactgctgcaaggttaggtaagaagtttgagaagtatttgttgaatgtagctattcattgtaatggtgaggagagaagaaaaaggaaaagactgggaatgaaggggatagatgagtgatggtttagagaaggtgaaatgtgaaagagttgaaaagggatgtggcttaatggaggagtggttgcatcgggtgagtttttttgttttttttttttttattatactttaagttttagggtacaggtgcacaacgtgcaggtttgttacatatgtatacatgagccatgttggtgtgctgcacccattaactcgtcatttagctttgggtatatctcctaatgctatccctcccccctccccccaccccacaacagtccccggtgtgtgatgttcctcttcctgtgtccatgtgttctcattgttcaattcccacctgtaagtgagaacatgtgatgtttggttttttgtccttgcaatagtttgctgagaatgatggtttccagcttcatccatgtccctacaaaggacatgaactcatcattttttatggctgcggggcgagaacagagtatgttaaatgcttatcaccaggatccttacagaaggagaagaggcagattctggggagaacagcataacctttggaccgaggttactgagaaagtgagatgagaggaggttcacaggcatgtgtaaggaaggcctctgataagaggaaaatgtttcttccatcatatcaggaaaaaagatggaggagatggtgcacacatagatatgcaggttttaatggcagaaagaaaagggatttcttcccacccccaaaccgagacagagtgtctctctgttacccaggctgcagtacagtggctcgatctcagctcactgcaacctccgcctcccaggttcaagctattctcatgcctcagcctcctaagtagctgggattgcaggtgcacatcaccatgcctggctaatctttgaatttttagtagagatagggtttcaccatgttggccaggctggtctcgaactcctgacctcaaatgatccccctgcctcagcctcccaaagtgctgggattacaggcgtaagccaccatacccgggcaaaaagggatttcttatctgaggtttttatcaaggtgaatttttgtcaagcttctggggtgaggagggaacgcgggagacttggagaatggagaaggtgtgctgtagccctgcacagtgcaagagagcaagcttgttggaatgtgctgggttactgggcagtaaggagcacccagttggtgttgtatatcatgtatttgctagtctctatggccgggtaacttttcttcagcaacatctacctactttgatgtaacacmaaagagagttctcattcacccaatatttggaggtttcaccaggaaaagagaagagcaaggacattgatgagtttgggaccacattatcaaagctggagtaaaagaggcatgaatcaggaagggctaacgtagaatgtataggtgtcattacaaaggaggcccaattaaatgtattcctgatgtacagggatagagactggggtagtaataccaggagcattatggataaagaaagagggaacttaaatattccttttttttttttttttttttgagacggagtctcgccctgtcacccaggctggagtgcagtggtgcaatctcggttcactgcaacctccacctcccgggttcgagcgattcttctgcctcagcctcctgagtagctgggattacaggcacgtgataccatgcctggctaatttttgtatttttagtagagacagggtttcaccatgttggtcaggctgatctcgaactcctgaccttgtgatccgcccgcctcggcctcccaaagtgctagaattacaggcatgagccaccgtgccaggccgggaactgaaatatttctaaatacctctgaaagaaactcctgactgtacactatgataccataactgactgcttctgcatattgaactcatctcagttttttagctggtaaaacaaatagatacagacatttgagtagtcctcttctgccctcagttctgaggaggatgcttacacactcatggtccaaatgagtcctatcctttgtaatgctgtcgcagtttcttccattcagtgttatttgctatctctttttactaatgcattgaaagatgtacatttgacagacagttcttattaaactatgtcatcaacagtattaaaatatttgtgctctttagcttaattttgctgcataaattaagtttttagcatgatgccagtggtttgctagtcatcattgaaaaactagttgtgaatgcttaagttgttttttaaagtactagtatttgccttcatgtgtgatggggtgtcactgattgtcatttgtatttttaataacaattgatttgtattgatatttctatttttcataaaaactataacataatttatcctttaagaaaccaacttaaatattttttcaaatccgaaaacattgaactaggactttactctggtgggtatgagctcttgtaggtttcttaggaactattttgtcaactattccactagaagagtagatggtaccctggtgccttaaaagcataatgtaacttttacaggtgcccagctgtacacccaagggatagtttgtgtatgtggaaggttagggctcatgatttggtcagatttatttttttactgtgaatatcaaaatatgtgaggcatgacaaacacatacawgcatatccttggtatgatgacacrttatgcaaaacctctttctttcagtgctaggaaaagaatgtcagtgattgttcgcactccatctggaaagttacgactctactgcaaaggagctgtaagtttttatttttattttttacagttataatttatgatggtttataatgtatatgttaggcattctatggaaatgtaacacagatgtttaacatgaagttgctgacatccacttttgttggtgttttatagtaatagtgttcagcctcttctggtgaaatgtggaattccttctgggtaaatttggtgctttgaaaaagtttggcctaggttatttttataattcaatttttgatacataatatttgaggtttatactatataaattgttagaagacagttaaatacagaaaatatttaaaaattgtattagaatgtgattcactctagtttgaatctaattttttaagagcatagaaatgggggaaaattagatcacagttactaccataattatgtcatgggactaatttgtcttgcattgttttaattataacaatttctgacatggctttggtatattggcagcttatattgacagaaatagtaatatgttattctaactgaatttctccagttaaatatatttatactcatgggaaaatgagaaatctgaccagggcccttttttttaattgagatgagtcagcattttccttctgaactgttctttccatttacctagtttataaccttcccaacttggaacattcctattttgaatagagtcaacaaccttgctttgtctcatagaaactcggaaattgaacttaagaagctcaagcctattayttaaattcattttgagaatgttaaatgccttggtttaaagacaatgaaatgcaatttttgaatgccttgattttaaagcattttggtagaattatttcatgatgtctcatgaatttagttttagaattcttttgattttgtattctcatcgattaaaacacctaacattttttcattgtatgcattctaccatcacagttcgaactgcattttggagataggaagataagacctaagacttgtcaggagcttagactagtcagagaaatattaaataaaaagaagattgggatacaattttaaagtgtattgtaaagatcttccacatcccaaaagtaatattcagtgataagggaataaagagagactttaacacatatacaccatggaatactatgcaaccataaaaaaggatgagttcatgtcctttgcagggacatggatgaagctggaaaccatcattctcagcaaactatcacaagatcagaaaaccaaacatcgcatgttctcactcataagtaggagttgagcaatgagaacacatggacacgggaaggggaacattacacaccgttgcagggtggggggctgagggagggatagcattaggagaaatacctaatgtaaatgatgagttgatgggagcagcaaaccaacatggcacatgtatacctatgtaacaaacctgcacattgtgcgcaggtaccctagaacttaaagtataataataaataaataattttttttaaaaaagagagcctttaagaccttccactttaaatggttgataaatgtccagtttacaaaacccgaatcacatcctttcttgtatagtttggaatcatcttctacctagaaacttgtttgaggagttaaagctttgaataaaaaataaaaaatgatggacttccatttttaataatcatagaattagcttgcatatatttttgctgttctgaaaaaaaatttaatatatttcatatagactttatttttaaagcaattttaagtccccagcaaaattcagcagaagatagagtccacatatacaccctgccatcacacacacacatagcctccccattatcaacatcccccaccagagtggtacatttgtaacaatccatgatctacactgacacatcattatcactcaaaccctagactgtacatgagggttcactcttggtattgtaaattctataggtttggataaatgtgtagtgacatgtatctaccattatggtatcatatacagtattttcattgccctacaaatcccctgtgccccgcctagtcatttatctcttccctcaaggccctggcaaccactgttgcttttactgtccccactgttccttttactgccttttccagaatgtcatatagttagaatgatatggtatatagcctttctggactggcctctttcacttagtaatattcatttaaggttcctccatgtcttttcatggcttgagagcttgtttctttttagcactgaataatccattgtctggatgtgccacagtttatgcgttcacctgctgaaggacatcttggtctctttccaattttggccattatatgaataaagctactgtaaacatgcatatgcatgtttttgtgtaaacataggttttcatctcatttgggtaaataccaaggagaataattgcaagatcttacagtaagagtatgtttcattttgtaagaaactgacaaactgtcttccaagtggctatgccattttgcattcccattagcaattaatgagagcttttgttgctccacatcttcacccacgtttgaagttgtcagtgttttggatttgggctattctaatagatgtgtactggtattttattgttggcttaatttccagttccctgaaatatgatgttgaacattttttcatatgcttatttaacatctatatgtcttctgtgatgaggtatcttcagatcttttgcccattattaaattggttgttcattttattgtagttacttttttatttttttaattgtatttattcatttattcatttatttttagagacagggtctcactctgtcacctaggctggagggcagtgatgtgatcatagcacactataacctcagattcctgggctcaagtgatcctcctgtctcagccttgtttttattacttgtacacatttatggggtacatgagaaattgttacatgtatataatgcagagtgatcaagccaggatacttagagtgtccatcagcttagtacaatacatcttttgtggagtatagtcaccctactcgggctatcaaacattgaattgattccttctatcatactgtatgtttgtactctttaacccagtcctctttatcctccctccttccatcctcctccctctgtctcacccttccctgttggtgtttgtactttctacctctatgtgatcatattttttttagctctcacatataagtgagaatatgcaatgtttgtcattctgtgcctggcatatttcacttgataatgacctccagtttcatctacgatgctgcaaatgacatgatgtcattattctttatggctgaatagtataccattgtgtgtatatacacctgttttttttttttatctattggtctgttgatggacacttaagttaattccatatctttgctattgtgaatagtgctgcaataaacatgtgagtgcaggtatcccctttgatatattgattttttttttcctttgggtacttacccagtagtgggattgctggattgaatggtaattctagtttctttgagaactctctatactatttcccatagtggctgtactagtttacattcccaccaacagtatgtaagaggtcctttctctccacatcctcgcctacatcagttatttgttgtctttttgataatagccattctgactggggtaagatacatctcattgtggttttgatttgcctctgattgctagtgatgttgagcatttttttcatatacttgttgaccatttgtatgtcttcttttgagaaatgcttactcatgtcctttgtccaccttttaagggaattatttgttgcctgttgtttcagtttcttgtatattctggctattagtcctttttagggtgaatagtttgcagatactttcttctattcaacagattctcttcactctgttgattgtttcttttgctatgctttttagtttaatataatcccatttgtgaatttttgtttttgttgcctgtgttttcaagatcttggtcataaattttttgcctaaaccaatgcccaggatagttttccctaggttttcttctagtatttttaaaagtttgagtcttatgtttgtttttaatccattttgattttttgttttctttgtatatggcaagagataagggttcagtttcatccttatttaggatgggtttttagatttcccagcaccatttattgaagaagaagcatgacctttctccagtgtatgttcttatcagctttgtcaaagatcagttggttataaatatgtgactttatttctgggttccctagatttatgtgtctatttttgtaccaataccatgttgtttggttactatagccttgtaataaattttaaatgtaggtaatgtgatgcccccagctttgtcctttttgctcaggattattttagctatttgggctctgttttgattccatatgaattttaggattattttttctaactgtgaagaatggcattggtattttgtttttgttggggggggggtattttattttattttttagtacatgaataaattcttcagtggtgatttcagagatttccatgcagccatcacccaagcagtgtacgcgatacccaatatgtagtcttttatccctcactcccctcccacccttcctctccccccaggtcccaaagtatgttgtatcattctcgtgtctttgcatcctcatagcttagctgtcacttatgagtgagaacatatgatgtttggtttcccatttctgagttacttcacttagaataatcatctccaattccatccaggttgttgcgagtgccattatttcactcttttaatggctgagtagtattccgtggtatatacagataccacattttctttatctacttgttgatttatgggcgtctgggctggctccatatttttgcaattgcaaattgtgctgctataaacatgtgtgcaagtatcttttttgtataatgacttattttcctctgggtagatacccaggagtgggattgctggatcaaatggtagttctacttttagttctttaaggaatctccacactgttttccatagtggttgtactagtttacattcccaccagcagtgtaaaagtgttcccttttcaccacatccctaccaacatctattattttttgagtttttgattatggccattcttgcaggagtaaggtggtatcacattgtggttatgatttgcatttccctggtaattagtgatgttgagcattttttcatgtgtttgttcaccatttgtatatcttcttttgaggattgtctgttcatgtccttagcccactttttgatgggattgtttattttcctcttgctgatttgagtttgttgtagattctggatattagtccctcatcagatgcatactttgtgaagattttctcctactctgtgtgggttgtctgtttactgtcctgattatattttttgctgtgctttttagtttaagtcccatctatttatctttgtctttgttgcatttgcttttgggatcttggtcatgaagtctttgcctaagccagtgtccagaagggtttttctgatattatcttctagagtttttatggtttcaggtcttagatttaagtctttgatccatcttgagttgatttttgtctaagatgacagatgaggatccagttttattcttctacatgtgacttgccaactatcccagcaccatttgttgaatagggtgccctttccccactttatgtttttgtttgctttgctaaagatcagttggccataagtatttgactttattactgggttcttcattctcttccattggtctatatgcctatttttataccactaccatgccgttttggtgactatggccttatatagtattatatatagtttgaggtcaggttatgtgatgcctccagatttgttgtttttgcttagtcttgctttggctttgcaggctcttttgtggttccatasaaaatttaggattattttttctaattgtgaagaatggtggtggtattttgatggaaattgcattgaatttgtagattgcttttagcaggatgtcatttttacaacattgattgtacccatccatgagcatgggatgtgtttgcctttgtttgtgtcgtctgtgatttctttcagcagtgttttgtarttttccttgtagaggtctttcacctccttggtcaggtatattcctaagtatttttatttttttgcagctattgtaaaaggggttgagttcttgattctcagcttggtcactgttggtgtatagcagagctactggtttgtgtgcattaattttgtatcctgaaactttgctgaattcatttaccagttctaggagctttttggaggagtttttagggtttttaggtatatgatcatgtcatcagcaaacagcgacagtttgacttcctgtttatcagtttggattccctttatttctttctcttatctgattgctctggctagaacttccgtattatgttgaataaaagtggtgaaagtgggcgtctttgtcttgttccagttctcgggggaatgctttcaactttttcccattcagtataatgttgactatgggtttgtcatagatggcttttattaccttaaggtgtgcctcttctgtgtcaatattgctgagggttttaatcataaagggatgctgggttttgtcaaatgccttttctgcatctattgagatgatcacgtgggggtttttttggtttttttgtttgttttttttttgagacggagtttcgctctttttgcccaggctggagtgcaatggcacgatctcggctcaccgcaacctccacctcctgggttcaagcaattctcttgcctcagcctcccaagtagctgggattacaggcgtgcaccaccatgcctggctaattttgtatttttttagtagagacagggtttctccatgttggccaggctggtctcgaactccagacctcaggtcatctgcccgccttggcctcccaaagtgctggctgggattacaggcatgagccaccatgccgggcctggtttttgtttttaattctgtttatgtggtgtgtcacatttattgacttgcagatgttaaaccatctctgcatccctggtatgaaacccacttgatcctggtggattatctttttgatatgctgctggattcagttagcaagttttgttgaggacttttgtgtgtatgttcatcagggatatcggtctgtagttttttttgttttatcctttcctggttttggtattgggggatagtggcttcatagaatgactctgaaaggattccctctttctctgtcttttggaatagtgtcaataggattggtaccagttcttctttgaatgtgtgatagaattcagctgtgaattagtctggtcctggaccttttttgttggtaactttttaattaccatttcagtcttgctgctgatctgttcagagattctgtatcttcctggtttaatctaggagggttgtatatttccaggaatttgtccatctcctctgggttttctagtttatgcacatagaggtgttcacagtagccttgaatgatcttttgtactttggtcgtattggttacattatagtatctcctattttgtttctaactgagcttatttggatcttctctcttattttcttggttaatctcactaatggtctatcgatgttatttatcttttcaaagaaccagctttttgtttaatttatattttatagttgttgtttcaatttcatttagttctgctctgatcttggtaatttattctgctgggtttggggttggtttgctcttgttcccctagttccttgaggtgtgaccttagattgtctgtttgtgctctttcagactttttgatgtagacatttaatgctatgaactttccccttagcaccccttgtgctgtgtcccagaggttttgatagtttgtgtcactattattcagttcaagtcattttttaatttccatcttgatttcattgttgacccagtgatcattcaggagcaggttatttaattttcatgtatttgcatggttttgaagtttccttttggagttgatttccaatttgattccactgtggtctaagatagtacttgctataatttctaatttcttaaatttgttgagacttgttttgtggtctatcatgtggtctatcttggagaatgttccatgtgctgatgaatagaatgtatattcagcatttgttgggtacaatgttctgtaaatatctgttaagtccatttgttcgagagtacaatttacgtccattgtttctttgttgactttctgtcttgatgacctatctagtgctgtcactggagtatttgaagtcccccactattattgtgctgctgtctatcycctttcataagtctagtastaattgttttataaatttgggagctccagtgttaagtgcatatatatttaggattgtgatatttcctgttggattagtccttttgtcattatataatgtccctctttgtcttttactgctgttgctttatgtttgttttgtctagtataagaatagctactcctgcttgcttttggtgtccatttgcatagaatatctttttccacccttttaccttaagttttatgagccctaatatgtcaggtaagtctctcaaagacagcagatacttggttggtgaattcttatccatttacattcaatgttagtattgacacgtaaggttctattctattcatcatactatttgttgcctgaatacctttttttttcattgtgttattattttacaggtcctgtgagatttatgctttaaggaagttctattttggtgtatttcaaggatttgtttccagatttagactccttttagagttcttatactgctggcttggtagtggcaaattctctgagcatttgtttttccgaaaaagactgtatctttccttcatttatgaagcttagtttcgctggatacaaaattcttggccgataattgttttatttgaggctaaaggtaggtcctcaattccttctaacttgcagggtttctgctgagaaatctgctgttaatctgataggttttcatttataggttacctgatgtttttgcctcatagctcttaagatttttttcttcatcttgactttagataacctgccgactatgtgccgaggtgatgatctttttgtgatgtatttctcaggtgttctttgagtttcttgtatttggatgtctagatctctagcaaggccagggaaattttcctcgatgattccttcaaatatgttttccaaacttttagatttctcttccttaggaacaccaattattcttaggtttggtcgtttaacacaatcccaaacttgttggaggctttgttcattttttttaaattcttttttctttatctttgtcagattggggtaatttaaaagccctgtctttgagctctgaagttcttttttctacttgttcaaatctgttgttgagactttccatttctctaagtgcggccttcatttccagaggttgtgattgttttttatttatgctatctgtttcactggagatttttccagtcatatcctgcatcattttttggatttatttaagttagacttcacctttctctggtgcctcattgattagcttaataattgaccttctgaattctgtttctggcaattcagagatttcttcttgaattggatccattgtggtgacttagcatgatcttttggggtattaaagaaccttgttttgtcatattaccagaattgtttttctggttccttctcatttgggtagactatgtcagagggaagatctggggctcaagggcaactgtttagattctttcatcccatggagtactcccttgatttggtgttctcccccttcctctagggatggggcttactgagagccaaacggcagtgattgttatttccgttcttgatctagccaccccacagagataccagactctgggctggtcctggggagtgtctgcacaaagccctgtgatatgatccatcttcaggtctctcagctgtggataccagcacctgctttggtggaggtagcagggtagtgaagtagacttggagagggtccttggttgtatttttgttaagtgtgctggttttgttttggttggcctccagccaggaggtggcactttcaagagctcatcagctgctatagtatagggaggatgcaagcttgccctagggtcaggcagtaggtgtgaagccatagagctcccaagagatgtcctttgtcttgggctaccagggcaggtagacaaagactatcagctaggggcagagtcaggcatgtctgagctgagactctccttgggtgggacttgatgaggctgctgtggggatgggggtgcggttcccaggccaatggagttatgttcccagggggattatggctgcctctgctgcatcacacacatcaccagggaagtggggaaaagctggcagccacaggacttacccagcacccatgtagcctgcagcccaaaaggctggtctcactcccactgtgcacccccaacagcaccaagtttgttcccaagcagccagtgagcagggctgagaacttgcccccagctacaagcttcccagctgagaaagcaagctgactcacagtccctcagctgtcccatggagcctgcagcagcagtcttcctccttcaaaaagtgtggattctcttggctttcctgatatgttcatgtggtagttcttggagcaaaagttcatgtcacgcacgtccgtgtgaagagagttcaccaaacaggctttgtgtgagcaacaaggctgtttatttcacctgggtgcaggtgggctgagtccaaaaaaggagtcagcaaagggtggtgggattatcattagttctcataggtttgggataggcgtacaaagtacattcttaagggctggggggaatattacaaagtaccttcttaagggtgagggagaatatatcgtatcagttagggtggggcaggaacaaatcacaatagtggaatgtcatccgttaaggctattttcacttttgtgcatcttcagttgcttcaggccatctggatgtatacatgcaagtcacaggggatatgatggcttagcttgggctcagaggcctgacaattcacagtatgagtctccacgctgctccatccatctgagtaggagctgcaagttagtcctgcctcctatctgccattttcaacattggtattttgatagggattgcattgaatctatagattgctttgggcaatatggtcattttagttatattattccaatccagtggggcatgggatgttttctattttttttgtgtcaccttcaatttatttattttttttttgagatggagtttgtcacccagactggagtacagtggcacgatctcagctcactacaacctccaccttctgggttcaagcgattctcctgcctcagcctcctgagtagctgggattacagtcacccgccatcatgcccagttaattttttgtattttatgtagagacagggtctcaccatgttggccaggctggtcttgaactcctgacctcaggtgatcagcccacctcggcctcccagtgtgctcccaatgtgctgggattacaggcgttttgtttttcttatagagatctttcacctccttggttaaatttattcccgtgtattttatgtgtgtgtgtgtctgtgtgtctgtgtctgtgtgtgtgtgtatttttttgaggcagggtctcactctgctgcccaggctggagtgcagtggtatgatcatggctcactgcagccttgacttcctgtgctcacatgatccttccacctcatactcccgagtaactgggactgcaagcacgcaccaccacacctggctaacttttttgtgttttttgtagaggtggggtttcaccttgttgctcaggcaggtcttgaatgcctacctcagcctcccaaactgctaggattacaggtgtgagccaccgcacctggccctggtattttatgttttttatgactgttgtaaatgggattggcttttttctttctcatctagatattgttggtatatagaagtgctactgatttttgtacattgattttgtatcctgcaacttgactgaattcatttattaaaatttaagttttttgttagagtcttcagttttttgcagatataagatatgtcatcagcaaagaggaacaatttgacttcctcttttccaatttgtattccttttatttttttctcttgttgattgctctggccttgacttccagtactattttgaatagctgtgaagaaagagggcttcctcatcttgttccagttcttggaggaaagctttcagcttttcccttttcaatatgatgttagctggggaattggtgaggaaatactcatgacagttacagtctttgtttctgcagctggtcatgtagtcgtaactggtattgttgactgccctcttctgctacccattctgttttccctttgccttcagcaagcacctcagcaggttgtggtttttttcctggtggagtgacccaaaccttcattcctgaagggtctggaccatttgtagtcctgcctggattgggctgttgtagtttcccattgaccttaatcacagggcatggtaatactaagagtcgccctaatggattcgctgtattccgtacatactcttccctacctctgttatggagcagtagactgatttcatcttggtagtctgggtcagtcaccccagccaacactgtaactcccttagcctgttgacttaaaggtaggaggagcccaaagtgtccaggtggcaatcttaacttccagtttaattgaatcattgttgtgtctcctgataacagtgttcctccctctggaactaagacctctaggccagcagaacataatgtcgcaggaacaggaagcaaaaatgttgctagtggatcactaggagtgatggtgagtggtgccacttccacttccaccccttgattcctggacccctgaatcctggctatgggagaaacagtaccatatattggatgctgattcagagcatacacggccttctggagaactttgctccggccctgcaaagtgttgtcacctagttggcactgtaattgtaactcaaaaggccattccacccttctatcaatctagctgcttcaggatgatgggaacatggtaagaccagtgagttccatggtaagaccagtgagcccactgccacacgtctttagccataaagtgagtgccttggccagaggcagtgctgtgtggaatactgtgacagtggatgcatgagcccactgccacacttctttagtaagtgccttggtcagaggcagtactgtgtggaagatcttgagtccacagatggtagtcttggcagaagcactgcgtgcaggataggcaaacccatatccagagtaagtgtctgttccagtgaggataaacctctgcccttttcatgatgcaaaaatctgccaccaggtggctggctgatcaccccaaggaatggtgccatatcaagggctcagtgctggtctctgcggctggcaaattgggcactcagcagtggccatagccaggtcatccttggtgagtagaagtccatgttgctgagcccatgcgtaacctccatccttgccaccatggccactttgttcatgggcccattgggtaatgacaggggtggctggggaaagaggctgagtggtgtccacagaacagttcatcctatccacttgattattaaactcctcctctgctgagattacccgttggtgagcactcacatgggatacaaatatcttcacggtttttgaccactcagaggtccatccacatacttcttccccagatttctttgtcaccaattttccagtcatgcttcttccaagtccctgaccatccagccaaaccattggctacagcccatgaatcagtatataatcacacatctggccatttctctttccatgcaaagtgcacaaccagctgcactgcttgaagtgctgcccaccgggaagatttcacctcaccactgtccctcagggatgtcctagaaaggggctgtcgtgcttcagctgtctactttcgggtagtgcctgcatatcgtgcagaaccatctgtgaaccaggccctagtcttctcttcctctgtcaactggatcatagggaactccccatgaggccatcggtgcaggctggggaagagaaggcacagtggtaggagtggagaccatgggcatttgaggcacttcctcacataacttacttgtgccttcaggacctgctcaagcctgatcacgtrtataccacttcaatttgatgatgcagtgctgctggtgcatgacccacttgatggctagatgggtcagaaagtacccagttcatgatacgcagttcaggtcgcatcgtgacttgatgacccatggtcaaatgttcagtttccaccaaagcccagtaacaagccaagagctgtctctcaaaaggagagtagttacctgcagattatggcagggccttgctccaaaatcctagatgcctccactgtgattcacctatgggggcctgccaaaggctccaaacagcatccccgtctgccactgacacctcaaataccattgaatctgctaggtcatatggaccaagtggcagagcagcttgtacagcagcctggacctgtgtccgttctggaccccactcaaaactggggtccagtggcctttagggtcacttgataaatgggccagagtaacacacctagataaggaatgtgatgcctccaaaatccacataagcccactaggcattgtgcctctcattgtaggaggggccaaatgcaacaacttatccttcaccttagaaggaatatctcaacagcccccacaccactggacccctagaaattttactggggtagaaggtcccttaattttagtcaggtttatttcccatcctctggcacacaaatatctcaccaataagtccagtgtgtttgctacttcttgctcactggatccaatcagcataatgtcatcagtgtgatggaccagtgtgatatcttgtggaagtgaaaagcaatcaaggtctcactgaataagatcatgacacaaagcaggagagttgatatgcccytggggtaggacagtaaaggtatgttgaaggcaaattgcttggtgggccttataggcaggagtggagaaaaaggaatttgccaagtcggtggttgcataccagataccaggagatgtgttaatatgctcaagcaatgaaaccacatctggtacagcagctacaattggagtcaccacttggttaaacttctgataatccactgtcattccccaagatccatgtgtcttctgcacaggccagatgggagagttgaatggggatgtggtgggaatcaccacccctgcgtctttcaagtccttgatggtggcactaatctctgtaatccctccagggatgtgatattgtttttgatttactatttttctagggagaggcagctctcatggcttccatttggcctttcccaccgtaatagccctcaccctaccagtcagggagccaatgtggggatcctgccagttgctaagtatgtctatgccaattatgcattctggcatcagggaaatgaccacaggatgagcccggagacccactggacccactgcaagtcagacctgagctaaaactccattaattacctgaccaccataaacccctattttaactggaggaccacaatgacattttgggtcccctggaatcatcaccagctcagagccagtgtccagtagtccccaaaatgtctgatcatttccctttccccagtgcaaagttaccctggtaaaaggccagaggtctctctggggaaggatgggagaaggattaacagcataaattgtcggttatgtagtggagtccttcctctagggtacccagcctccccttcattcaaggggttctgggtctataaactggctcaagtttggaaattgattgagggactgtgattctctgtttttgtaactcaaaattagtcttttatccattcgacctagaagttttctgcttatataaatttgaaaactcaggcaattccttttgagtgtagtgcatctcctcatgagtcacactctcatcctcacgtctagggactcgctgggactttagtctagttataggtctagaagcaaacaggggtgttgggggtgggtccagaagagaatcaacatcatcttgcctggcaactgcttcaggggaggccatcgttgttacctcaggcagcacaggctttatctcctcagacaaaagtggaaaggctgatggcaacatggttcagagaggggaagttgcccctactggggatggggaagctgttacttctggcaaaaaaggttcatcagagtttacaaactcagtgtccccagcttcatcagggtcctcccacacgtccccattccaagttgcggggtcccattcttttccaatcaatgtcctccctttaacagtagacacctgttgaggctaygcatgcacctttccttgcgggtcagccattcgcatgataacagcttgtgtctgtttttccacaatttcagctctttccctgcaggagataagactctcactcagggcagtcttagcagatttgagactcagtatctgcttctgaagccaggagatagaatccctgagttcatcattttctttcattactttgtccactgaacttaggagcaaccaaccagcttcattatgttccttggttctccacatatggccaaaggtattatgtatagagtcactaaactcattgtctgtcatgaaagaagaatcaggaatgtcaaatgcatttattttacataactctccagtttatgccaaggactatcagtgttctccatactacaggtagagtccttagcattttggggtctaatcatattaagcagccacctccagaaaccccaaaaccaatgaaagaactccatcttaatattctgttcctctagagccactcttggtaccaaaatctgtattagtcagggttctctagagggacagaattaatagaataaatacatatatataaaggggagtttcttaagcattaactcacacaatcacaaggtcccacaataggccatgggacctgcaggctgaggagcaaggagagccagtctgagttccaaaactgaagaacttggagtccgatgttcaaggacaggaagcatccagcacgggagaggctaggccagtcttgccatttcacatttttctacctgctttatattcgcaggcagctgactagattgtgcccacccagattaagggtgggtctgccttccccagcccactgactcaaatgttaatctcctttggtaacaccctcacagacacacccaggatcaatactttgtatccttcaatccaatcaagttgacactcagkattaaccttcacaatgtttattcatttttcatgtgtaggcatggctagccgacccattttcattttaaaaacatactatacatgtaatgcagaaggccacatctttcttctgctttttctcaacactataaagaaggtagaaaattaatttttctcattctaaacgtcagtgtcttccgctagaatgtttggatacagtaccgaatttaatccttttagctatattacttatcacttttgttttcatgattttaatgttttcaaatattttcttagttttagaatggaatgtattaatatcattgaaaatattattttcaaatttaattcttcttaaaagaagaatttacaaatgattcttctcattctcaggaaggagccatgaggggaaactatcatttcctttcgctttgccccccacttcccattccatcactgaaaaatgaaaagaaattcagaattgcggcttggaatactccatctgttctgaggtcactaagttgtgtttctctcaagggttctaaatcatactccattagtctgcttccaaatatcagccctgagactggagaccccaaaatgggtaataccactgagaaagtaattgcagataagtgatttattttttcctggtctaataaaaccgtgaaggttgaacactaaaattcttaaagcactaaaccaaagctgcataataactaaatgaatagtaggcagtttataaaagagcaagaactagagaagcataagtgatgcatgaagttaaagctgaaaaggactttaaacataatctggtaacaaaattttacagattaagtaaactgagtcttaaagctaaagtgacacaatcagaaatattcagctatttaaggcatttcgagagttgttcgaggttctcccacaatacccactggccctctcagtggatttagtcctgtattaaagtttgttcttctgtgagcactggtcccataaacatgctctaaaccctaaaaagttctgtgattcaacgagtttggggcacatagcatgtagscccttcgagatccactgtgcacactggcattttaaagtccccgaggattattccagcaagacaagctctgttgctttgctcagtccagtgtttgccaaacttacttgagttctggaccgttcttccttgcagcacctatgaatacctatgaaggtgttctggaaaaccttctgggttagggtagatcttgcagcatgtggaaggtaagtgaggtagaatatgagatatgaacatgggaataactacagttttattcagaaagaggaaagatgaagatgcaagactagagacttattnatgtcactagcaaaatagtattattagacaaaaatatcttgttctttaaaacgaatgccaaaagagattggtggttgttacactgatttcctactgctattgttaccaacatcaactttattaaacccagaatgcttaattaaatcattttaccctctgtttgttttccaggacactgtaatttatgatcgactggcagagacgtcaaaatacaaagaaattaccctaaaacatttagagcagtttgctacagaaggtaagtgtaatttggcaataaagcatgattaaaatacaaagaaatcatatacttctgataccttgcagkatccttattattattagacttagagattcctaaagtaagatatcagctgttggcaatttagattttactatatgctgttcccagcctgtgtttttattttactttcctaaaactatatttattaaaattttgagcaactttgtccccacgttttagatggtagggcctataaatgttttacttttagagtggatcatatttaccatttagatacttcactttgtatctcgagcaattcattaggaaaagaagcaagactcaaaaaaaaaaaacagatattctaatctgaataagaaagaagaaataaacytaaactgttaaaatagctattaaatttagtttcaactcaggactttctattaaaaacttacgtaactattaaaattgttattcaatttattacaactcaagacttttttagagagcccctaccacacgccaggctctgtgtgaggcctgagaatccaaaataggataaacaagctttgctctgtctctctgtcctcctgaaatatattatgtgcaaggcaaagcagtacatagtctagagagaggatctaggttagatgaaaggcagcgagggttgttaaacatgagagtcagttactacaagaatttgtagtcttatctcgtacttaacaatggtagttatagctgaatctaaatctccagtctcagttttcactcctatctgtttcagctggaactgttgccagtggcaccaaactgacctaatcaaatactttttcccgttaattcaggcagagaaaagataggaatgttttttaaaacactaggcaaaaacaaaagccaaaacaaaaaaaaagatggcttttgaaaaacctctgtgcagttcttcaaaatgtaaaagcatggaaacatatatattcataggattcagattccataaagcccagcctcagtccttggcaggtgcaacctacccagcatacaacacaggttctttttgttttggaggagagctgagggcatctttctcctctctagatgtgatgttaaagatactcaactcatagattttaatggtttggcccccacctctaccctattctttctgtccctgggctggatgacacttctccccatgactaccctccagtaagttttccagccaagtttccaagagagaaaaacatgtcctaagatggcctcagggatttaagttccactctcagtgatctggcaatacaccaccctttcttggaaggtagagttctctgggaactttgtatgttccttgcttcttacttctgatgtgttcccttaaacacattttgtcttgagatcactaagcctagcatctggtcctagtcattctaagagttaaatgacctggagtgagggcgttgtcttcttgtgaacctagatatctaactgcttccttgggtagctgacaagtgttttggcctctcctttcttccaatgcatctactcttttctggctgagagagatgtgagttacgaaattggcaggcaccagacacagggtgggtcactttacatatcagctttgattgttttcccggggtatatctgctggcagttcttttttgccactatccctcaactatacttagacttttaaactacagatttatgatgacaaagaatagtaataaatgcagtcatatatcctagtaagaggaaggtggctttcccagtagaccccaccagggtctctcttcctttgtaaacatctgtgaggcctctataataagtcagccactatgcttggtactgaagaactctgggtccctgctttccaagtgctttaatagaggagacacacaagaaaaactgtaaaacattgtcactcacgctgtaggagtgttactgcctttggtatctaggtgagaggagggtgcatcaaagagctgattttcagagctgagtcttaaactgcttgcaaggcagacagtgggcagtcgttgggaaaagcagaatggagaaaaagttaccagcatgtgcaaagacccccctatgtgggaagtgaatggcagggaatgagagtgaaggcacctgatgaaacatgtataagccgtgctttggggcttaaattttgtcctggggaaaaattggaagattcgaagcaaagaactgcttgataagattcagattttagaaacgccacactatgcatggaagatggattaaaagggttgggaattagaagcagggtaccaattttaaagaccaggggaacattaatctacattttatactaagtttttgtcataatttaattggacttcatcatattgtttgtatggaatcacttttttcaaaatgggactttgtgaaataaaaacagaaacctcagacttctgaagaaaatctttggtgtgttggggtgatgtatgctatctttttcagggttaagaactttatgttttgctgtggctgagatttcagagagcgactttcaggagtggcgagcagtctatcagcgagcatctacatctgtgcagaacaggctactcaaactcgaagagagttatgagttgattgaaaaggtacgtggatgattctgttgatcatacagagggtttggtttccagatagttttgatctttattcaaggaaccaatggaataaaaatcaaaatatcttgacataccattcactattgaataccctctcatcatctaagcattaacaagtattaatatgcattaaaatattgctgagaagcctttggggttagacattactttgtatagatcttcactcttttcacaattttggatcaaggtttggccagtctggcaatctccttgccartgtatttcagtttctggatctctgaggatatggaacatgcccctacacacacgcacacattacatacatgacatgtgtgctttgagttaataactataatatgcaatgcaatataaaatagtactgtaatcacacagcttgcatagctgataatatatatgagagtaatccagtgcttacacttgtccagtcattgtgacaaacatatacctgtattatttctgtcgcagctgtaaatgttctcattttacagataaagaaaccattgtgacaaacatatacctgtattatttctgtcacagctgtaaatgtcctcattttacagataaagaaaccaaggctattaagccagaaagtgatggatacattatgatcgatgctgtataaatagcaagaatcttgcttccttaattaagaaaacatttttgtgtagctcttgccgtgtgccaggtgctgttcatagcactttcatctattaatctagtcctcacaacatccctttgaggtgctaattattcctgtcttatagatgaagaatccaaggtaacagagagggtaagtaatttggctgagagtacacagcttctaatagggggagccagaatcctcactcttcctccagtattcatgctctaaatcattcaagtgacttcattctaacctctagcttgccattagataactcttcaatagcactcatgtttgtattgcatagaatcaaactagcctgtccgctgcggtttacttgatcttttctccaggtaagtaaaggctgatactttgttcttctttcctctctatcgaactgtgtacttcgtcgtgcctctgtcttgaaaggtggctggtgccaccagtacctccctggactatttcccccctctgctcctcacgtcccctccctttatgtaatgtggggatgccatgttctagctgcagatggttttctttattgcacaaggttaccatatgcaactcgagatattggtgtcctgtctcctcaacagattatcactttttatggaaggtgattgtttctcatatagcctttgtattttgtaaggggaagatacctaaatataaatataagctcacatatatcatacctgtatatatagagatagatatgtagatatatctagatatctcctccttatatttgaactttttattctgcttacttatgaaaagacatgggatagcatgtatggtgtcttccagcatgatactcccaccctaaatgttataggtatacacacaccaggagacttgttatcagttgacttatttcaatgtctctcttgcctatcttccccacttcttccctccccactccctccaccttctcgctctccatttcctaacatatttatatatgattatgtctttggggcatttatgtagtaaaataaaataatctgaggccataatcacaatctcttttaatctgcccaactaaagtcacatatcttaaagcattagtgctattgatttttaatctttgcttctgttactcttttaagaattaaaaaaaaaaaatccagtttggaaatgatgtttttcctgtctctgaatataaggcagccttgccttgccttataatcctcatgagacagaattaatatgtaatgtcagaataaaaaaatctatttgaaaatggattctaaacatattaaattgtttccacttgaagtacaacttcagttctagagtagaatgtttaatgtacctaatatccttactctctggatgccctagagttttttatagattagattttctaggtttaacagttttgtttcttgttcttttaataactgattaaaagccttgcaacctccagcttttaactgaactagatgttcaacgttttcccagcagatggcgatcatgagctacattaaaatttaagttgactgaggcactccattaaaagtggggagagtgtgtgtatacacatatacacatgcatctatatatgtgtctatatgcatccatgtaaactacatatagtttacagatgacagaaacctcccttatgactgttttttacctaaaataaatgaaaacgggaatttataactaatttgtcttcacttcatagtaagccatgctctctgttgttgaaaatctaagatccggaaagattaagagattgggtcatttactcagccagcctgctccaaatgaagactgattctgtgtccatctctactcctgaaactggagcttcatttggtgatctatttaaataactttcatcaagcagttcatgtttacatgctcatgcacaagcaaatgagactgtggccctctgggtaccacggtctgagcaaattccctaaatgaagaaatcttaaggaacccaaaaaggtggcccacaaatttgacctgaaggaagcttttggagaggtggtaatttttgaaatgggcctccaaggattattttaccagttggaggagagcagacatcattgtagggaaaaagaatagacaaaatagaacagatgtgatggctcacacctgtaatcccagtattttgggagaccaaggtgggaggatcattgagcccaggagtttgagaccagcctgggggaacatagggggagactccatctctgtaaataatttttaaaaattagctggatgtggtagcatgcacctgtggtcccagctactcaggaggcctaaggcagggagaattgcctgagcccaggagactgaggctgctgtgagctgtgaaagtaccactgcactccagcctgggtgacagagtgagaccctgtctcaaggtaaaaataaataaatatataaataacacagggatctttgtgaccaagctgtttttctgaagtgtttccattaactgtgatcataggaggactgtaggatttttaatatagagagccagggttatatcacttctttcttgatctcagattctattctttgttaaaatcagctgggattagggttcagaagttgtgatttactgccattaaaaccactctagtgaggcaagtttcagcgtgtcagaccacagattcttccagmatgttaccctggctttaaattgagcaaatacagtcctagggttcatccattgtcttcttccttacctgctttaactgagacatgctgtttatgcaatctattttttatgtgattggaatctatttttacgtagaccataatattggacttagcatgtcattattggacttagcatgtcagacagtgaatctttaaactgtgagggtcgttttcacatcttttattttttaagaacagaattttccaagcaaacattgcctgaatcataatatatataattgacgaaagcaggactgctttggctggagtaagagtagagaggagatccaaactggctttcccctcagcctccaccttgccctcrtgggtgctccaggcagggcttgttgtgactctgaggatccactaagcacagtttgaaaaccatgtattacatttgtatgtggacttttagaaaacaaattcctcaaaagatcagtacatcattgtgcccgtatgcaagatgtttctgaacatatttgaattgatatgtcattgccacattaatggyagtattatattcacaacattcaaaatgtaaaagatttgtaaagtttttcctaaaataataatttagtacaaaataagaggaaatgttataataggattaaggttatacttttaaatgctgctctctgcctcttgttcctccaatgtttgttcaaactggtaattcagtttttaaaactaagttgaatccttattcctttgggtagtgtaactcctagcataagctgaaaaaaatatccaaatagaccaaaaatatacaacaaggcatttatcctttggttgtgatgcttagttactcaggtatgttactacccagcacactgagcactagaatgtgctgccttcactcttggggaacactatgggaaggaggatatggaaagtgaaaaagcccaccggctattgttatccctattgacagtcatctcgagatgagaggatttaggacttttaaatctatctataaaatataattatcagctctgttccaaaactgtactgtttgagctccaatacttgcattcatatggtaagcttttcaggacatttctaaaaattttaacactgagagttgtttcacgaatcagttgccgacacatctattttgtttattttttcttttgctgttactaaataaatcaagaggtgacattgattagtaggaaggcctaacttgttcaggaataagaaagctcacatggttagaatgcagatgggattatcatatgggatatttcagttgtcttgactcactttgcgaagaattgcaggttcacattgggcattgtggacagtaacacctcttagtctctttttgtcaccacttgagagaatttacagtggtctcattctttagacaacaaacttgacctgttttatctcaccctcgttcttttgaaaggtagtcaacatattaggactcataattttagattgggaaaccacttatagtgtcagcctatattttttaaatcagaatttgtttttttttttttttttgagacggagtctcactctgttgccaggctaaagtgcagtgtcggctcagtgcaacctccgcctcctgggttcaagcgattctcctccctcagcctcctgaatagctgggactacaggcgcccgccaccacacccagccaaatttttgtatttttagtagagacggggtttcaccatgttggccaggatggtctcgatctcctgacctcgtgatccacccccccttggcctcccaaagtgctgggattacaggcctgagccaccgtgcctggcctaaatcaggtttttaaattaaaattttgtatttcctcaagaagaattgtaaataacagaataattatgaagttccttgtttcattggcaggggtttctctgaaatttctcacctttgatctgtcactttaatatatcaggagccagggtgatatcacttctttttggtctgagcttctattctttgttaaaatttgtttacttttattctaacttatttctaagacacrtaaattatgttttgtctcatattcatactatgctactagattcctttgaaaattaatagtatagaagtctctggtctttcttccttattttataattaaaccattgtttgaaatatgaaggcgtgccttcgtggaatacataattttttgaaaatgtttaatatttatttgcttcaatagaaaaatacaattatgtctttagtactgcatagattacctactaataatttctgtgtttctgaaagtaaatcatttatcttgagaattacagaaaacagcgtaagctataatacctgcctagattcatcactgattaaagcagtatttccctggtgataagatttttatttttctcttattatgatgcgtggattgggaaacttttttttttaatggaaacttatycaatgcttttatctgttcaagtttttctaaaataggttatgggttagaggatcatttctgagcttaagagtaaactcagaacactgtaactctgctgtcaagccttttttgatcagatagcaatgttgtgttttatgtgcattttgtagtttgtgattgatgtatgtcatccactagattgaagtttcacgaaagcagggactgtgtttatcatatttatcactgtgtctccagcgcttgactgactagcctatgttaaccactcaataaatatttgatgaataaatgaattattcatttaaataattaattcagaagttggagcttaataagtacttgcttaatgaaagcctgccccctattaacaaatctagttcatgctttccatgcattgaaggcactggtatcaaatgtgctatcactaaggattaatttaggggtatgttagaaaagaagccaataattttacagaaggcattctttagaagtttagattcgttcatttataaaacctgtcttcaaagttacttgatatataaatgtgagaaaatcatgggttggaaagattcagcaacaaatatctgagcaccgctgcgtggcaggttctgttctaggctctagggctcagcagggagaggatagaagaatttctgccttttgtttcagtggtgggagataggtagtgaacttgtaaactaaaacaatgtcattccagagaggctttagtgccctgggcactgagataaggcactaagataggacagtgaggtagtgatccttttttacattatttcctttacccctccccaaaacgtggttgacatttgggggatggttaaagagtcccttgatgtggcgtaatatagatcaaccattacactcagtgtgactaaacaacaatttagtgccctttgcaacatatggcaacaaatggtttagaggattcctagagaaatataaaacttaatggaaaacaggacttttcttgagcattcatgactgccaagttcacagtaacttctgtattagaatggaatgcttcttcagataaaactaccacatctattcttagtagctgcacatatcactttcatttgtgctaaaaatgaaatgaaaatttacatgatgtatgggtgatttcgtggtttaaaattccagtagtttcctgttctatttgcttaagaacatttrtagttagctcatttaattagacctgccactttctgagcatttactaagctccgcaattttcactctttaccctgattatttagttggagggcctctaaagtgagacacaacgtgatccattggggtargcaagaaaatattagaacttctatttgttttatttcatcttttttagtttttgcattttataatgtgaataatttattaattttaacaatgttttacaaaaatataactgtgtcataagtacgtattcaacattttttcctagtatactcaaaaatgtttgtgagataactggtgtaatttcatctgcagaacatccttattaaatctacgttattaggtttatcttgctgttgtgaaagttgattcttaggtaagttaagttacttgctcagggacccatatccagtggttggcagagcagggatgcaaatccctgttctgtcttaattccagatcccatgctaataatctgtaagttacgttgccaacttgcttttgaagaaagcaagaatgtgtataaaatattggagacttgaaaaataaaatgaaatcaattgtgcagttgcataatcactagatcactcagggtgagaagtggggctcatcagcctgtttgagactcagctacttagtgaggcagcctctatgtactctatgtactgtattccattttccttgaaarcaagatggaaatatgtttttcatgattttccctcaactggccgttagaatcttcttatttaaagtacttaagatttccttagatctctaatcacatgctcctcctttctggtaggataggttccttcttatgaatgcttcgtggtagattttccaccctgggtattgctgtcttctcactcagataagatggatgcgttgtttttgcaagctacacccaatcacctctcacatcctgattcctttcagctgggtgtgtgaattctggccttataactaagcccttggctttgtgagttcaaatgtgatttctatggtttgaaaagcaccaagttaaaatctatttcttggccttagaaaaattaaccagttgaatgatttctccagaagtaggcaaatgagccattccaatggtttaaggacttaatgctcttagtcttagtactgtaggccagaataaagggaaaggaaagaaggtgttaggtctctttaaaacaaggatgatacccagtggaatgcagaacacagaggagcccagcaacctctgagaaccagtgttgtagaatgcctctgagaatcccacagcacatcccaattccagagttaacgtattttaaacctcaagagaatggtgactgcagtagcctcttaatttgtcatgcaggcttcttttgtcctaatccagccccatacagctactagtgacctttctgaaatgtaaatctgatcctgtctctcctcttctaaaattcgccaggtgtcccttgcctttgggattgtcagcataacacacagacctttccatttccattccctgctggcttttccagcctcatcttcctcactgccacacgtcacttcatctatcatttccatactgactgaatggcagcttctcaaacattatgtgtcttttcacacatctgtctttgtacatgtaatttcttctcatttggaatcacctcccttatccttccccacctctccccatttcttggctaaaccttaattcattgtttagtatttaaagtcaagtgtcagctcatgttggatagattttctttgagccatcgagactaagatgatacctcattcctgtgtttatcctttgtactcacataagagtacatgtatagcatgtaacatacaatgtgtataacattttttaagatagggtataacatataacgtgattcttccaggggagcactgtttctctaataatgataatcctgtattacagtttaaaggctttgtagtttgaaactgcaaggaaaagaaagagaattggtacctgagggtctaaggccaggctaagggagaatggtaggagttggacatggggatgtctacggtgatcagacaagatggagccaggtgcaaagatgggatgctcacaagcattctacatcaggagttgcaaactccakttcaagggctaaatccacccactgcctatttgtaaataaagctttactggaacacagctacatccatttgtttacatgttgtctgtaactgttttcatgctaccacagcataattaagttgttgcaacagagaatatatggccctcaaactttacagtattcaccatctgtccttttacagagaaagctagtcagccctgctctagatcagcagttctcatagttacgttctcagaccagcagctttgcaaccactgcacatttccaggcttcaccgtagacctattcaatgaggaattctgggtgtagggcccagcattctgtgttaataagctcctcgggtgattctgaaaattaaagtttgaaaagcaccatctagatttctggcctggtggctaattaattacttgggacttgatgacaaccaggcagtcagggtttaggagaaacaccagtaaggcaaggaggtacagttagaaaacgaggcagccaggaatccaaggagagtttctaatgaagctttctgaaatataaatttcatgcaggaaggaactcactattgtatccccggcacaagtacctgcccagaagcacctgcttggagtatatttgtgaatgaatgcaggcatgcatgtgtgcttgtaaaggagctaatcctgaaatgtgaccctgaggcctgcaggtaggaatagggaaataggtacacctgacgggtgactcaggcctgaggctgaaaccctctcatagaaatgaagtattattgaagaccaagaacagacacaaaagtttaaaaacctgatgatttgaacaaaattctaattttcatctaatctcagttttacatcccatttgcttccttgggtatgtattagttcttggtgttttgtccttacggtcatagcttagctgcacctctagttgaccttagacaatttactcaacctccccaaagctattaactgaattactaaatgtaaagcacttagcagtgcctggtacaatttttctatccgtgaaatgctggtttcctcttcaacatcttcctagtcataatcttatttcatatggaaataaatcctactagtatttatccacatttactccagtggtacaatttggtttaataatattactttgtctttaaggaaatttctgccaaatagcccatgttgtaatctgaagcctaggttgatacgagtttgattattatatctttctcatttagaagcatatcacaaactttaaaaaaaaatgacatcatctaagcactgacataatgtttgctaatatggaaataggtcactttgaggttccattatttagcaaaatatacatgtattggggaaaaatcataatttctaaagctatcataatacattttaccaaactacatgaagctttctgtcctcacttacagtagaaatgttacatttatgtgcctttttaaaaattctgcatacattaggaacatctgaaagagaaaacattactggaggctttactaggtgaataaacattattttatgattttttcagtgataactaaatctatattatgtcaaagagtcatcaacctcaagcctttataacatttagcttggtgacatttagaaagtaaaattagtgtttggagtttttttttgaattccataaatgccatgggaattttatcgcatttcaacacttgctgaatatgtaattcccctagtgcccattagtggccatctgtgtaaggtaatacatatttgggatgaaattgattatagcctaaacactcttgtgttatgatcaggaaaagcacgcaaagttcaaatctttttttctagtgatcattatatagctaacaatattaatttccaaaagcagaacagcccatcactcaagattctgatctcaccataaatgataccagggcaaaaggaaaggagtctgcagaaccttctgctaaaattaaccagtgctgttctcaaggagctcctgggataaagggaaaattaacacgcttatggagtacagtgtttccttcataggcatcaaagtagacccattacaattttgctgaatattccgaaatgttttattattcttcttaaggatttgtgttaaagccaccacaacactccatgttaacctacttgtgtgacttttctcagcataccttgctggccctacatctttgatcctttatgttatttgtgcctgctttgaaaatgtttctcttttacctgtgcaaaactagatgctttccttctttcaaatatgatttcaatgtgatctctccagtgaagtcattttatttttataggtatgtgagtggtaatgtattttatattggtggactttctgagctcatttttccccttagagtagagacagaaaatatacaaaatatttgtttatatgtttctaatgaatgtgttcgtatcttggctcccacattatctagttaccccagtgttttgggaaacataytgcaaaaaaatatttttgcaggaaattttgagggcttgtattaataagctgtccccatgatcactaaaaaaaaaaaccttatgccttgggtaaaatgcttaaaatttgaacacagctatatcctgatcttcactgggatgtgagccagaatgatttaactgcaaatgccctaaaagtagctgaagatttggaagaatcattgtgtaaacatttaaattcaacagttgtggtgctggcatcactgatgctgaattgttcttcctttccttgcttgaacttcttgatgataattgttcatcaggttatggtagatttcaaatctgcttcccattaaaggaaataaaataatgctatcttcttgaaagaaatttaccttcctgtattatatattatacactaagaagtcatgcatcaagtgtgtctaataaccatccatattatttggaatatattgaaaagaaaatggtctagattgcagcagtatttttgtaatttctggattttggtcttgtcattagctcacttagcaaacatactaaatgctgacattcaatgctgtggagtcattaagatgagcaagacgtggtccctaattttgagcaaacctaccatactcatgcatttacacttctcttaatgtacatgaagatgagcaaaattctgtaggagaacagcagaggggaaattttattttaagaaataaaggaaagcttaaaagaaacaataacttttttttttttttttttttttttgagactgtctcgctctgttgcccaggctggagtgcagtggcttgatctcggcttaccgcaagctccgcttcctgggttcatgccattctcctgcctcagcctcccgagtagctgggactacaggtgcctgccaccatgcccggctaattttttgtatttttagtagagacgaggtttcaccgtgttagccaggatggtctcgatctcgtgatccacccgcctaggcctcccaaagtgttgggattacaggcatgagccaccgcgcctggccaagaaacaataacttttgagtttggttttagaggatgaaccaagtttcaccaggcaaggcagtgggggacatgtgtgtgtatctacttagacatacatactcatgtatacaaagacaaatactatgcatgtgcgtgcccatcctgtatggccgctatagcggggactgttgcctggccaatttagcactcattcccatcccccttcttcctcaacagctctactatggagcctggaaaagctaaatacaaatagttggggttagccatgtaaaactatctggccragtatttggaaatatgctgagggcttttcaaaacactttgcttttcatgtaagagatagatacagttgrtatttttgtcttctatatggcctttataaytataccttgggacattgggagaggtcaggagaatgagttgaggtatggtcgagctacaaatttaatgtccacaactgcccagttcagtactacgtaagtgaggaaaattaatttatttaagccattgttagatttttctattacttgcagccaaaaagcattccaaactaatgcaggtataaattacatgcatgcatatacacacactttctctctcacttgcatgtttgtatatatagttaactttattgttcatgcctaagcaaagcttgagactaattttagacttcaattttggtgaacaataaggaaaagtagaaaatggctttctttgttatcaccaattctggcttactttcccttgcattcattcccttgcatmcattctgccctcacctrtattttaaatggaaaaaaaatgaaggcaagagaggagaaaatgattgagaagaaagataaatgctgacgaggatcatgctggaggttgaaacagggcaagactgagaatcagttggttgtggcctgcagagcactgttaagaagggtacccagctagcaacagtgcctagtcatgtgatggaaataaaattttatatcttaatccatcactacattcttatgtatttaggaccaagaacaacattatctgtgtccatttggcaaaccaggtttccctaacagccaagagattgttctctcccgcttaccatctccgtttaggaagatgagagtagaaaccattctttctcatgagagattaaaacagctttggctgggtgtggtgactcatgcctttaatcacaatactttgggaggtcaaggtgggcagatcacttgaggccagcagttcgagaccagcctggctaacatggtgaaaccccgtcttatacgcaaattagcccagtgtggtggcacgtacctataatccaagctactctggaggctgaggcaggagaatcacttggacctgggaggcggaggttatggtgagccaagatggcaccactgtacttcagcctgagcaacagagcaagactccatctcaaaataaataaataataaaaataataacagctttccccagagcccattggttgtgtttggtcttatggtacaagacaatatctaatgagcaagagatctttgagtctgatcttcccctacacaaatgtggaactatgtgaaaaacattcaacttgttcttccttgcagagactaatactatcactttgttgttcttttcctcttggtttctaattgtgtatacatttccctgacactgcttcaaattacaatttaatagtgttaacatgtaacctcactgtttttaaacaggtcagcaagattgcatcttcactatggtagtctcccatagctgtttgtaagtttttttttttttttttttttttttttttagaatgcctgtcctttttaactgacttttttttttttttttttttttttttgagatggagtctcgctctcttgcccaggctggagtgcagtggcacgatctcagctcacctgcaacccctgcctccccagttcaagaggttctcctgcctcagcctcccgagtagctagaattacaggcacacaccaccatgcccagctgctttcttgtatttttagtggagacgtggtttcaccatattggccaggctggtcttgagctcctgaccttaagtgatccgccagccttggcctcccaaagtgctgggattacaggcgtgagccaccgtgcccaggctgtttttaactgactttggattttactccccttctatgcaaatttattttagaatctgttccttaccttaggggttgggttagacagtttcagggagcctcagtgtaatgcctaaagactgcatgaaartcaaggatatttcagaaaactcaatgggatagttggaatttacaccaaagtccatgaattatcatttagtctctgattttaaaacatatacacacttcaattttttgtttttaaagaatatgaacggatttttaaaacatttctaccactaatttttttcagaatcttcagctacttggagcaacagccattgaggataaattacaagatcaagtgcctgaaaccatagaaaygctaatgaaagcagacatcaaaatctggatccttacaggggacaagcaagaaactgccattaacatcggtaattcacctagttcacattttacatgttggtgctttttaataagttaatgtagttcagaagatggatttgagacatttcaagatctaaaagatttgatatgtcaagattggaatattccaatcttttttcaccattgcatctctgcctcccatccataagtggcacatgtggataacatttctgcagttgtctggagattgggcttatggaagatttatgtattgatacttgattatgtgaccaaaggttattttaagataataggaaagaagaaggttgctaatttgcattcatactatgttaatccccatgttttggaaagagtttataatagctcgggcttccataagagcgtaccacacactgggtggcttaggcaacagaaatttattttcacacagttctagaagctggaagttcaagatcggctgtcctcacgtggctcctcttctgtgtactactccttatgtctcttcctcctaaaacatcagtcctattgcattacagtgctgtcttagtccgttctggctaccataacaaaataccacgagctgggtggcttataaacaacaaatttatatctcatcgttctgaaggctgagaagcccaaggttaaggcaccagcagatttggtgtctgatgaccactggccttctggttcatagatagcaccttcttaactgtgttctcacatggtagaaggggcaaggcagccctctgaggcctcttttataagggcaccagtcctattcatgagctctctgctctcatgacctaatcatctcccaaagaccccacctcctactgtcaccatactagtgactgggtttcagcatatgaatttggggggaacacaaacattcagaccatagcaggcctcacccttatggtctcattgaaacctaattacctccttaaagactatgtccaaatgtagtgtcactggcggttaggagttcagcataggaattgggatgagtggtggtagggagatcaattgagtccctaacagagatcttacacagggaaagttgtttggcattggaagcctgtagtaccagcaatatgccaaaaaagaaaaaaaaagttttttcaccaaatttagtaaaagtaggtagcttgagcactataaaccctgacatggatttatcctcttgatagtaatcatatatattacatacaaaactccacccaagttgaaggaagtattttagaggagttcacagcatgaaaccacattttttagaaagccattttaaaatattgtgtattttttaaaatttagctaacatttattttagaagtattagcagtcagcctaacatatcctgtaaatataaaactctacttcaaatttatagcaaattgatgttattaatagaaaattcagtttattttttaaaaactagtagaactttacaaaccacacaagttgttaattttgattgtaaaaattatcgctgctattagagagaaaatggaaagaatatatatgagaaggaaaataatggtgaaatgcagaacatattgaaattgggagacctaaaaacacaaatatgataaaacagactacaaatagaaaatatatggcaataaagggcagtaaatgtggaaaataggaaaatgtcaagttcaggatatgttcaccattatgaatgttcctatgaaaaaagagtatagtagtggtttctggtaacatttaacatttagaatcttgagccatgattgattcctagaaaaacttagggaagattcacccattcagcataattgtggtatatacagtgccaggtactggttaagtgcaaggaacagagcagggaacgaaagaacccaaaatctctgcccttgtggagctcagatactagtcagagaaacgcacagtaaagtaaattagaaaagcacatagtataatagctatcaatgattgctataaagaaaactaaaatgggagggaaacacagggcattgcacagagggattcagttttaaatagcacagtcaggwagaacttattgagaaggtgacatctgaggaacaacctaaaagaggagagggagcttgtcgcatgatgattagagaaaagctgtcttctgttacagagagaaacagcacaaaaataaaagaaagaatagtagcagaagagatcttcagcatagcagtgtccagggtggacggggcctcccaggccactgtcaggactctgcatttactgcaagtaaacagggacatcacttgatggttctcagcagaggaaagacatgctctgactttcctgtaaaaacagtcactctggctgctaggctgaaaatggactcagagggaagcaagtgtagaatcagggagaccagtgaataggcttattgcattaatccaggggaaatatgatggagacttggaccaaggtggtaacaagggaaagggtaagaagtggttggcttcttgatgtgttttaatggtaagaagttgttaggttcttgatgtgttttaaaggtagagacaacaagattgactgatagatgtagagtatgagagaaagaaatagatcaggtaacttcgaggtttttggccttagcatccgaaggatggaattaccattaacccaaatgatgaaaactgaagggaaagtaggttttcttgatgggggctggaggagtgtggtcaggagcctggtttttgagtaggctgactttgagatgatggaaatgcctacttcctatgtaagtgtctgcggttaagtaagtacttggatatgagagtctggagttcaggaaggagggctgagttgaacataggagtttcaaaatggtcaacatttagatgatacatgaaatcatgagacggaatgagatcacaaaggcagtgtactcacatagtggaattattttaaataggatggtatttttaaaatgtgacatcagcagagttgcctctttagacacagtcggctgtagcaaacaggtacagagtaggccaagttgaattgaacaaagggaggatttttgccctgcagtaagtgcaacaaagcaagagagggtaggaaggtagaggatgtactgattctcccaggaagggagatggtgatgggatcagcggatccaagagacagccacctgcaccttccctaggtgtctagagaagggttctgttattctattttctagaaacaatcgttggcctgtcttttgctcttcatgttggttatcatgaagtgtattacaaatccatttgtcagcttcaggacatcgagaatccttaccaccatctttttccagatgtctttgtagccttaacaggccagatgtacttgttgcatatccctcctatggcaagcaagagcatttcatgtttaacttcctacaaacctggaaaacaactggttgccctcagtcattataaaatcatctttagatattttcatagtacatatcattgttttaacatctttacatattctctggagaaattaattttaatatacyctgtgtttggatacaggacactcctgcaaactgttgaagaagaacatgggaatgattgttataaatgaaggctctcttgatgtaagtaaaattatgtatttttaaaactcctttaataatatattcatgctatagtattttatattcagatagctatggaaatattttatctttctgtggttcaaggtaccttatcactgttgttctgttttaacataatgtactctgttttgagtcacattgatgtaaattgattcaagctttacatctgtgacagctaaaagaaattgcaaaatgatttgcrtaatattgtgagacagaaaagttgttttacaaaagcattatgtcaagaggttgctgagtgactgcaacttgctcatatccaagtattctgtatgttaaacattttacatctgctttaacttccagtattcatatatattttacctcttctaaaaaaatgtgaaagctattgaacaacacaaaacaaccattcctagtaggacggactttctttaatgtcctaacatctggaatgaaatgtaaatccctaggatgtcttttttcatggctgtgatcacttgatgttttatttgggaaatgaggaaagatttgttaggaatacagtgtaaaatagttagcaaaataatatgtaggtcaagtgacctgttaatattaaagtaaaggagactatttgttattttaggtggaagacagagccgtagaggtgattatacaacttcttaaaatagtcattatgacgcaaagaacagagaaaaccttggtaattagggatgttgacgaagctgagaggccacatgcgtggaagggatggtgaagaaatgactgcagaagggatggtgttgatgtctttgtcagtaacatgggttacaggtggtgcacagtttttcttaatacctgaaggaaatcagagctgtctctgtgatgcagaagcaaaagcagggcaagccacgcgtcatttgatctggtatcctttctgtctggctttgggcatttaccttccgtagcgtatggtagccttgcttcttttgtcttattcttgccatcatctttctccagttcttggataagcatgttctttaaatgttttaagtatcaagcagagaatagtaatctcaagaaagagaagtgaaatatcaaaaatattcattgtgttgtrccagtgtattgttaagacactggcatttattttcatttttgaggtttctaagatggtaactcaaaattaataaacacttcaaaggtacttggactgcctgtttctaccagagcaaacattggtaggagtctcaagttgaatactaaatttcagtaaaagcaggaactatgtctgtcttttctggtttatcattctttttcagtgccctgcaaatggcctagcacatagtaagtacactataaatatttgagaagtgagtcactgagtaatttttaattaagggcttcttttttgaaaaaaaaaaagtatatcagttttaaatttggttgttgttgatcatatctgatattttttaagtaaagtggctaaaagtctccttagcagttcgagtagcagtttaaagatcacaggcaaacactgtggctgaatggattaacactaatttgtccagctccagactgccaggcattctaacactgctgtctggggaaggcttttctcccagggagttaagtggtgactttacaaatctgactgtttagggtcagacctgctgcagtgtactcatttgtttctcagcaggaaaggaaacatcacttcgcgtagctccttccgatcttgtgtcataaaacccatggctgagatttcaggcaaatcattagatgtgctagagtgcctgtaggtaaatcattattttttcgttgatatggaaatggaacgcatccaatctgtgttcaaattgtactgatcagtagtgaatagaattattttatcagcacaaagaataattagcatttaagtaatgaacttaggaatataatgtcttaggaaatgtgaatgtgtgttttgtcaagtgacaattttaatgagtgcactcaaatcattctgtgaaatagcacagggtgaagagcacagttctgtcccaatctgactgtgggaccgtcagcaaattaaaatcagcttctctgagccagttctgctgcctacaaagtaaggagaatgtaacctttggcataggattagcatagttagcacagtacatggcacatgtaaaaaatgagatgttataaaattttgtagagagaatattatttcagtagcttgtaagttgttttgcatagtgatcatttttgttataagaaaatactatttcctcatcttttacttttttccctaaggtggcaagttacaactgtaggttctctttcacataagtgatacatattgagcatttttctgttcagattttctactaaaatattgttcctaaagctgataaaatccaaaagctgaatctttttcttgtgttgaacttctataatgtatcatatttgaagctcttaaaatttcagatagaaaaccctttctcctagtgattatgataatagaaatctttgtcttccataatctagatcaccaccgaagaaattccactgggctttctaattttttctttttgagtttcaatatgagtatccttcttaaaaaaaataactcttcagcatttttaataaaaacatttaaataaatacataagaccaaactacagttgaaaatacaatcataatggaagtctcactctacagacctgatagggaaacctgacaggtctttctgccttggttcattcttgactcctttcatagcaagagcagcagccccggctagaatgtcgtccaaaagcaaagccaggtgttctcacccagttacccaccaggctcttgtaaaattgccaggatcagcagaaagcttgattttttttttctttttagaaaaaaatttcatggataaatgtaattaagaatcatgtaaagttgatcaaaacctattaggtatttctgataaataattttttaaatttgaataactttctatagtgctgctgtgaactactttactaggagttctgattgtgttctcaatatgagatttctgtttttgttttgttttgttttgttttgttttgttttgttttgttttgtttttgagaccgagtctcgctgtgtcacccaggctggagtgcagtggcacgatctcggctcaccgcaacctccgccttctgggttcaagcgattctcctgactcagcctcccgagtagctgggatcacaggcattcaccaccacacccagctaatttttgtatttttagtagagatggggtttcaccatgttggccaggctggtcttgaactcctgacctcaactgatccacccagctcggcctcccaaagtgttgggattacaggcatgagccactgcgcccagccaagacatttctttaagcatctgcaaaggcagaaatttcaaaatactgatttgaaaggggaatattttacttctctaactccacagcaatgcccaggaaatgtcccacagacttctaattaatgataaacccttatacctagtgatacttttgcatctcttttatatcgtttagtttgttttaattttttaaagtctgtctgttaaatctggaaacatctagaatgtgagctaagcactagagaatctcatactgtggcccatctttggctcccagtttctaattaaactctttcgaaatgcactgaaacagttctggaaggattgggtttatgcgatattatttatatcctccatggcacatcaactccaaatctctggaaatactttcaggcaacctaacatattatatttttgtataggtttggtctaagtttcctcttgtgggagaaaaattttgaagacatgtttcattgagatagctcaggatttcaccacaatttcatctaaatctagagtgggtgggaggggccatcattttttaagccattaactgtgtgacttaaacagattttttagaggtatcaaaattgactgtcttgagtctctcgtgatatacccttaaccttgatctctccttctggcatctcttttatgtgaggagttgtgggatctgtccccagaggtagagctacatctcaaatccattttttctatttttcatcctcctttctgtactgccaggctttcctagaaaacaaaagtggggtagaaagggaaaatatacactatacatttattaaatcaacaggcatgatgtttggagacataaatttcctaccctcaaaagcttgcagtcagtgttcccaagcttaactcctgagaagccctgccacctctccttctgatcatcctggcagtttttctagattgtctctgctgttgttgatgttcaccttcagcctgatcaggagccaccacctaatgtatgagaagtagtgtttggatcctgcaggaaaatgcagctttctgtgtattttgtaccaggtactagattgaggactttatagggacaatcacatttatacctgaaactattaatttatatgttataagtagatactagtatgcccattttacagataaagaatctagaaggataactggaccaagctcaggtagctcggcggcactgggggatacatctaaggaatttgattccagagtgtgggaagcaaataggtttttctagccttcatctactacmtttgtaaaacaagaataatgaaaatgtccatctcatttaggggtggagttgtgaggattaaatacaacaatacctgttaagtacttagaaacaatgctggacatcatcatcatttttttttttagtattattatttctagaggagagttcttcactgctgtccgatgtaacagatgactttgaacagccattctactcttaaattacttaaagttctctacttaatttgagaatatgaccccaaaccagctgtaggtttgattatggataccagtgtttcacttcacttacatattttacagaaaatgaattgttagccacattggatattaagttaacaagcattagaatatatatttttcaacactgtggtaaaagaaaacccttcatggaattgctaacttttttctagctgaatttgacattctaacaccatgtaagttttgactataacttataggacattcaggacataaaggctgaagttgtcatctgtacccttttaagctcaacttacatgtattatgcggacagacctcactgttttgggaacgggccactgttgaatggcttctgaaagaaatccagaataagcaagttattgactcaactccagaaaagaagggaaaaaagagaatttgggctacttcaggttttgttttgatatgtcccatgagtctcatacaatatattttgtattgctttgaaaatagtttaggcaagttttaaaccacactgagttttcctccactgccagcattggtgcttcagtactgtgaattttcttttaccattagcaaagctgtttcagctttttggcttgaaattttaagatcaaagtttaactttgaaggtgttaatgtatccctatcagaagcaaagatatttttttataatgtcctaatgcaaaaagattgttcgaatattgtctggcacactgcttactccaagtagctctcagtaaagaaagccaactttgttacatttgaaataaatgggttagtaaaaagtgtaaacattaccaaaaaatgaaaataacatatgaacaaataatctgttctccttttcctggatttaagacagtgtctgctgcaagccaaagtacgtggttgaaaaagttccatcaaacccattgtctgggctcatagaattaaatgtgtcctttttttttaaacaaaattcagcgaggctggcttgtgctgagaaccttaagtgaggttgttcacaaatttatagtgtgtctgttttgagaagttcttccacccctcaaccctgaatattctttgcctcatttttggctaaatttctgaactcttccaagagctccctgagacctagaattgcagataaatgctttctaactagtctgcccccttgccattctcccccacaagtttgttgacatttctgagaggcgcaygccatgcctcgtgccctctttgcatctctgccaccaataccttctgatgagtcagcacacgcataaaatgacagtttttaggaaacctactatgtgccagtacgcctggtgtatctgtaatctgtgctcctttagagctggtggtgtttgtctcagttccagatagagactttgagttcccatgtctagcragtgctggaatcttaaatgtgaaccttgattgcttgaagtcccaaactgtttttgtttgattttggttttaaataaccgtaccttctccagtggcagcagtaactcatttgcagaaagaaatattccagcagctatctcccaaacttattaacttgtttcattttcattctccatccaacacttatccccctttcccattttcctacctcctttaccactcaccaccaggaccacagaacccctgaaagagggagactcttctggaatatgacaatgcccaaatcttgtgattatggaattctgaaaagacctcatatttaattttgctaatacaactgtacataagatgttattgactgtgtgtgtgtgtatatatatgtacgtatatatgtgtgkgggggggtatatgtgcatatatgtgtatgtgtatatatgtgcgtatatatatgtgtgtatatgtgtgtatatatctatataaaataatggaaattgtgtgcgtttgggatttgcactgagaaaatatggcagatcatgattcttctattttcttacattaattaatttaaattatttagaaaatgggcccaacattagctttctctgtggttctgggtaacaatttctcacaggccctagttgttaccttctccaaactgttgatttgtaatttgcttattctgagaaagccagttgtgtattctgagcagcctcttcctggctgaattgaaggtaatgagagagactggatgtctgcctacccagttcctccccgcgtgctttgcttctgcattcactgctgccactggagaatatttaataccaaagtcaaaataagtgtttaggaggctttcagtggtggtttaaaataattaccatgggggctttggtaaaagcctttatccagaaaactctttaaattatataattatatcccttatcccactcttccttcctttccctggatttgtctgtctttgctacatgtccccacccccgtgctgaaacacagactggacacagattcagcactttgctgcctctctctgcattgtaccctaagtgagactagatgcctcgcaagcacttatttgcctgatggaacctatcataatcccaaatctcaaacctctgttgaggggccaagagcaatttacccagcactacaacttcctcttcctacctgcctccattttgtgacccttgacctttgtcagatggcatgacccttctgggagattggaccacttcctcaattacagtattccatatctacccccgtcctgggaaacctatatttgtgtatcagcaaagcatggaattttttttctcttttcctctccccattatctttagcaatatatattgattaaatgcgttcgttgggccgccttcctctaagctgtttggaggacctctttgaccatgtgtttttaatgacttcaccttctgtctgccttacccgttttggaaaaattactttatattggtttgattctatacacatatgtttttcaacattatgttctagtacaggctacgagtttggaaacaccaaagctttttgatcaaaaactacatcaaaaaaaaaaaccaataaatacaattttttaaaataagttttgattttataatgtgtcagggggttgcaggggaaccacgtcaaagagagctagtgatcctgactgggatgaatactaaatgggccagttgtacataaatgtagtttctccctactctcaggcatacgttcttttactaccgcctgcagtagctggaggagtattgatatatgtgttgcgtaggagtatatggaatgcccagtgttccactgaatcaataacacattgtagaaaagcaagtaatacccaatggtttatccatatgttattatgggagccataactcactctttaagaacgtgctaacattgtccatacttgatatggtcataatgtattattaagaatgttyctagaatgttccgttaattcataattttaaagtgtgaacatttggagagtgtaagagtagagacagaatgaaacatgatttgaccataaatttgtaaatacctcacgtcttaaatgatgatgaggtggagcctcaaaccaccaaaacagctaataaaatatgtgttagtttaagattcttatatatatcctcttatttgacattttaaattaatttatagtagattttaaaaggtagagccttagcaaactaaagtaaggtgctggtggtgtttttgttttttactcccagtaaacatttatttctctgctttaaaaacaaaacctaagaatgaactcagtggtgttgtgtctgaagaacatgtcagcaaaacaaaccctgggtgtcgtctttataattaattattttaaaccaaatacatacattgatgtggtcacctatgcagaactatacagataataaaagagaaatgccacatcagtttataactttccaattattttcagttaagaattctatcaggttggagacagaaatkaagagagaaaatcagtggttagttatataaatatttgtcctcctaccatgtaccaagagctatatgtcacatgagactagataatgccatctttcctagattgagaagacaggtttccagaagtagctgatagtattgaatgttggcagtcaaaaggtaaattgaaataaaattgccattgggagatttcataagaaaacttaaaattatcccagtcacatgagatggagtctcactctgtcgcccagtctggagtgcagtggcgtgatctcggctcactgcaaccttcacctcccaggttcaagcgattctcgtgccttagcttcccaagtagctgggattacaggcacctgtcatgtcatatccagttaatttttgtatttttagtacagacagagtttcaccatattggccaggctggtgtcgaactcctgacctcaggtgatccacccgcctcggcctcccaaagtgctgggattacagacatgagccaccaagcctgacctctttttttttttttttttttttttttttggggcatgatcttggctcactgcaacctctgcctcctgggttcaagaaattctcctgcctcagcctcctgagtagctgggattacagacatgtgccaccacacccggctaatttttttgttttagtagagaaggggtttcaccatgttggccaggctggtctcaaactcctgacctcaagtgatctgccttcctcggcctcccaaagtattgggattacaggtgggagccaccggacctggcgcgtttcgtgttagtacctttgttagacctgataccagaggaagggcagaactaacctttcctggatgtcacttcatgccaggcactggacagggcactttattcacaaataaaggagttagcacatcttatcactataatctctctacaaaatagatagtaacccaatcttatgaatgagaaaaatgtgattcagagaagttaagtcacctgcctgaggaaagacagccagtacgcggcagagcaaggattcggaggaaacctttccaataccacacagttggccttctagagtcagtcaaaccaaaaaaattacattaaatcatgaggaggtacattgaaatacatacataactctggcgaagagtttatgataggccatgaaatgaatttacccataatactttttgatatgtgtgatataatcctttgtagaactctaagctcacgtagctgcccaagatccaaaagggttttggagttcttgctgtcttaagtaagtggttgaaactatttattatttcctgtttaacttttatcattcattagggaatttttttcaaaataacatttaattttcccttttccaagaaggtgaaaaatgtttgattagtttatctttaccatactgtacatccacctgaagttgacgaaaacctggagttctgagccatagggtatgtttcgacctttggaacttagttctttacagtgtgacgtcattttattttcaaatgttatcagtgtccagagccattgtatgcaccctcacgggccagcctggactttctcacatctcacttttttatgactgcacgtttgtatgatacaggcagaccactgctttctctacactctggtaattcgcatgtgtctgctgaccagctatgaagagttgtgtcacagtggctctgcctccagttacctcgtttcagtagagtcaccatctttgttcagcaagatttctgaaggtgttttaataacattctgttgcattttttcctttctaaggaagggaagtaaaaacagaaacttgtgttgctgatactgtagagggaagcacaggcttcctgaacttatgttcattctgacaaaggtgaaagttgtatatcttccaaaagtgatttgttgttagttccgatcatatgcttatttgtttaactggtggtgaactcatgaagaaaaataacaaatccaagaataacgaaattgtcttagttcattcaggctaacaaaagtaccatagactgtggggcttaaacaccaagtctgtttcccacatttctggagaccaaggaattcaagatcaaggtggcagcagatttggtgtctcttgagagccttcttcctggttcatagacagtgtcttcttgtgtctgtgcatgatggaagaagaagggagccctccagaaatgctttaaggaccctaatcccattcatgaggtctccaccctcacgacctaatcacttccaaagaccctacctcttaacgccatcaaaataggagttaggatttcaacatatgaattttggtgggatacagaccctcattccataatagaaatacattattaaatgatgtatctgaaactcaaagtataatgcagaattttgatttttttttcctttctgggaatagaatcctcccttgtaacataagtttatcatttgacctgcacacatttaacagattcctaagaataagtatagatgctggatacttgtttttgtttggacctaaatgccaaagtatactttagataagtatagacaggctttttccttttacttttttgtttggggttagtcttactgatagacaccctctgggacatatatgagagagcacatgttatttactgaagccacaaataagtaattgcagcctcagagcaagatctggaagccactaccattagctgcttcatgtcggactatttacccataattttcacctcgtctctgctctgtgaacccctggctaacgagtcatggagtcaaattctagaggctatgcttttcctttccttagggatgtttccacattctctactagggtgttgcttggatttgttcctgagtaatactgtctttcctgtaaacctcggctagaaagctgaaaaggaccatttttatgcaggtgctttctgcagcattactttaggggccatcaaaaacacagtccttaggtggcctcacatgttctttgcacatctggcctgtgggttcgttagcttgttccaagcagagttttgccaaaatgaaaatgacaacttgcatgctatgatactttccaaacaaatcagggcttttaatttatttcactatgaaactgtgtcagatttcattgtctagggcaccctcacatctcacttttttatgactgcacgtttatgayataggcctgtttttttatcaagggtttttatcaagggtttcctcaatattaatgaaaaagattgccataaagctgctagtctctaatttctcaaagattgctgttacattattttattagagtttattatatgaacatattacctgtttgggaaggttatatcttaatgattcaaagtgaggaattctacttggcctcattatctgccaagcatgtttctttatttttatttcccaagcatgtttcttgtaaaccaaataaatattatttctccttggcccactgttttacaaccaaggttgatgactaagtagctgatctaaatatacattgtattacattcactagacaatttaaaatatttgaggccaaagtagatactagatcatgactacctctttttcattttctctatgagataagcacattagcattttctttattctaaatcagagtatttaagagtatacaggagttttacaggcagcagacaacaatccttaaaatggtcacacaagaaaaccactttaacttcctataagatattctccaatcattaataatttggttattctgttattaccttttcatcaaagacctctgttccaaagggaatatagacatataaatagataagctactcaacatcatgctaccttgtataagtatactgtaaatgaagtatttcagggatccaaaagatagaggtattgatgtcacctggaggactcagggaaagtagggtcaagggaatgtgtcttggtttatttgttcattatttttagaataagaaaattgtgaccttttaggtaggcttaaaggaaaaggaaatagtgccaatggggagaatgaagatgcaaagagaagtgaaagaaacaaaaggtgagaaggcaggtgttaccccagctcaagaactagaggggattaggtaaagggaagttttgaggttaaggaaggaaagttgagggaattctttctgctataaatgtataaatgttctcagtaaaacaggccgatgtttgccgaagtgacaggggccaaatttggactcttgaggagagaagaaaaggtctggagtagcctctgggaaacatggaatccactagacatggataaaagactagaccagcagtgatgagcagccacataagaagagggagctggagtagatcctgccctcgcagtgaggtggctttttcctttctgtgttaacgagacagaacctagaggttgtgttgggtgtggcctaaatggtgaatttgcaaggcaagaaagcatagtaggaggttcaggctaagggcttccagtgagcactgggctctgtctgtgtggtgctgtgggtatgggaagagcagagcagaatggttgtccagaatgaccacacaggctgcaggtcagggaaggggcacgagaatctcactttccactgtggctccctcccttgcctggctgagtgtttgaaccccagcctttcctcttacctgtccatctccccagattgcctttaccttgcaatgtctctgatgctcctggactttcagcccacgagtgaaaatatgcagaacaaggaaatagagatcttttatttcattgagcctgtggtctttgatcctttttctgatttagcttctcattgctatattttcacttttacaagtcactaagtttcaatatttaaaaatttcccccttcagtagccaaaaaaacaaaacaacagctaatatagtaataaatttatccttagctacaggagataagcttcaatgcaatgcagccataaagtatggctcctggacttaggggagaagcaataaagtttcataaataaaagaatttgaaaatactcccggcagtaaataaggataaaatataacttgtaactggcagcacacagctaacaacagagcttacaaaagaaaactataaactaaaatgagaaaatgtttgcagctttttttgttgttgttaccttgcaccctaggtgggctgacgagtgaattcactgtgagaagtttttgactcaccttctgaaatgttatttctatcacatctcttgacaccttctgatttgccagagatctgtgatagtcaccaacaaaacctagggatactgatgtcacgaatttagagaattttcaataaattttaaggtgttagagaatgccttataaaggagggagagcggggaccacaggactgcataccctatgttggttcatgagggcgtttcacagttctggggtttacttgactttcggtcttgttttgcagctgagctttcaagaaattcgaagtcctcctgaggtccgtctcaggtttcatttcaggttttcagctcagaaatcacttgggcaatagcttaaaagaaaatacagaggctttttagtgagcaatgcctttgtttgaaagtctgttaaagtaatggattatttgttccctggaaaattagggagcaaagagaagacctctctctgtgtgtgtctctctcttactctctctctttctctaatcagaagtgataataaagggggaaatggagcattgccaacgggatgaaatcagaatttatcaatgctctcattcaataaatatgtatttcatgagcatctgtaattgcagacactgcctttgttgctgggaaacaggtttaacgcggtctttcctgtcaagaaactcagggttttgctgcagtagaatgagttacacttggtagcgtggactgaacctgggagggcttacagggtaagcttggtttttgaaggcagcagatgatcctctggagaggaggacattccaggaagagggaaacaaaagaaaccaagattgtgaagggcactgggaaggaaagttaggctcagaaggtaggaagccttacatgccattttaaggagtttagaytttattgtgtcagctgtagaaagccctagaaaatttttaaagcaagaagagacaagatttgtgttttaaatttgttttataaagagatgtctctgttggcggtaaagacaagatgagagacagatgatgagggctcaagggaagcaacagagggactggtgtgggcattccatttctaacttgctgcgcctggtactgtctgaagtttggtttgttgtttttttttttgctggattgcatagaaaaagacaggctaccgcagaaatttcattctcactttgatgtcactacttaatagccacatatttttaagcaaggaactgaaacactctcatctgcagaatggagataacagtagtgcctcctgctcaggatggtagcaagtgttaacttaaatgctgcatctctgtgttgcatctcagaactgtgcttagtgtgtagtatgtgctaartattttgtatcagttcattgacttatttgttcatttaatctatatgaatttgctgttaagataatccaggggatatctattatagattgtcattagtaaattttgcttgtggaatttattaccaacatttttcacttctttaagtcctcttgggccaaaaatttccagcaggaaacaggagggtgaggcttgtaaattaaaacagctactctccccccatccctgatgtaaagtgtgaacagaaaattttgcaaagaatgctgctatatggtggtcctttgtgtcactgtgtgtaatggggaacagggcaactgttaagtgaagcttcagcattaggaaagttgggcagtctttctttatagtacaacttggttctattattttggtaaaaggattctgatattccagaacatagtgtgaaccgcatttgcatacaaatgtaaaaacactttcaaaaatccccaacataaaattttaattacctatgcctttgcttctctgtgaaataactacaaaatgaccatatatatataaaacgacatgcttaaattggaacaataattgtaaatcccatgaacataataaaaattgttatataagtgtactgtatttttattgtaggtatattttattatataaatatgtatatttgtatttattttataaataactgtaggcttagcactcagaacagaaatctgataggaggggaattactcattatatttccttgtgccaggccagtgttgtgtttcttcaccacggtagggctcttgtgaaataggaaattggctccattaggttataggaagaatctataggatgtggggagaaaaactaaatgtattgaaactttatccctttgaagagctgggaaagcagttcttgacaaagggagacaaatagttgaggtgaacaaagctgtcttgacactaaaggcttttattgtccctgaaagtgaactcttcattgatagaaggcgttcttttatttgatccatcaagattaccaagtcacaggtcaccatccccaactaaatacaacatcatgaaatcatgattaaaattacaaaagccagttcataaaagaggcaagagtttacagattgtgcatttcctcctcttagttactaggagttaaattcaatagcrttgaggatttttgaaagaatgcctgtaaattatttaaattacagtttgcttaatgaaatgatacattctgagaaacatgacattaggcaattttgtcattgtatgaacatcatagagggtacttgcacaaacctagatggcatagcctattccagactcaggctayacaagatagcctattgctcctaggctacaagcccttatagcctgttaytgtactgaatactgtaggcggttgtaacacagtggtatttgtatatctaaacacagaaaaggcacagtaaaaatatggtctcacaatcttatgggcccaccatgggatattcagtctgttgaccaaaacatagttaagtgatgcatatattccccaacttcttcccttcattcatggagtagcaactttgactagctcataaattaacacgatttttaacaaaagaatttactgaaaatatgtttgccgtattgtgattgcatggtcgtgtaaaaagtaaagtagaggttcctcttcaaagactttcctccccgtctaattaggaataaatagtaatttctcttaaaagcaaaatttattcaaagacctgtgctagccataataaagaaatcaatgtactttatgttcctagctcccacaatttagcctaaatatttgccccgacatgcttatactggtccaagcaagattaggtcatagcctgttcctcttccttatttaaaagtgtttttacctttctcagcattccacaagttacttccgccttcctttgttctcctttacctttgcctcttttaaaaggttctaagttgctagccaatcgggacaaatacagaatgtgaggtcccattccagccaatggaaaccggacacagcggtggggtgaacgcgtcaggttataaatgaccctgtctcctttgttcagtgtactctcgtggcaaaactgctggcgagtgtaccctttctgcaaaaagtaaaaatggccttactaaataaattaaatttatgttcaagtgctatttctttacagcaccggggaacaagcatttcaaacaatgatggttagaataatgagcaaagactacagaatcacctgagaaacaggtgacttatagtctagtcccaaccctgctaggaacagatgtgtgacttcaatcaagtaactaactttttctgataacaattgtscaggctcctgaggggctagtaagaatcaaatgactgaaagtatgtgaaagcaatttgaaacataaaaagcactaaaaataactaaatgtagttgccaratatccttaaggcatcctagtagaacaaatgggagtaaatgttgatggcatttttgcttgtttaatattccagggaacaagggaaactctcagtcgtcactgtactacccttggtgatgctctccggaaagagaatgattttgctcttataattgatgggaaaaccctcaaatatgccttaacctttggagtacgacagtatttcctggacttagctttgtcatgcaaagctgtcatttgctgtcggtaagttctccttatcattgtcagattttagtaaagaatgacttgatctaagttcttgatttataaacgtcaatgaaagtaatccagagtttacaaaagttaggttacttactaatgtgttcactcaagacttgagkttcacaaactgggatggaatttgttagttttaaaaagtgagtcctaacaatcattaacaagtatttttcctcatttgaatcgacaggtttcttgccattatctttgtttaaaattcattatctacctgcatttccacctaggtcctttctttaaaggtcctgttgtctatatttaaatctttgatccagctgctaagacttattttgggggaatagcatgatgaaagatgcaaactgaatcattttccaaatagctgggcatttttctgagaggtatttattgactatacattcctttgccctctaatttataaaattgcctatatcctaaattaaaatctcttttgagttatcaaggcctaattcatagaaaggcatttttgtaaacgacatagctccagtccttcctgagtttcttgtcaaggaatcttccccatatttacgtataaattgtttaaactccgtcttcctaagacctaaagtaggttcatgaatatgatgaatatgcccagtctcctcttttgtgatcaccatgaaaactaaggatttcccctttgtcattcactattgaatcttaggagttgatcagtctagatcctgggtagcaatttctcaaattgccttctcttcctgggacataaaatgttagcagagattctgaaagatttctcagtatctgtgcttttggtattatctttaaaactattctatgtgcttttatcgttttctttaaaaagacatttactaataaagttatgctttttatacctcttttgtctgggtttattcacttaaatattttgtatatggtattatttatgaattataagctataccttatagacatttcctaaatttcagttgagacatactttctgaaatataatttaaactattctcaatatcctttataagcatcattttagcctataaaattataccatattcagagaattaagagttgcttatctttcccaggagtctaattattttagtcatataatttctttttcttttctgtggtatgtattaacaaataatattactataaagttcttggacaatatattgtacagatgtttaatattagtcatccggctctttgcttaatcataaagagactggaaattattttgactcatttttactttggtattctcatgctttttaaaatttacttttacagtgattttgctggattccttgcaaatgtcttgactaagtgtgactaatgttcaactttgacacttttcatcagaataatgtggcagatttggtcacttaatcactttaactaatgggatcataaggatcaacaaaagattgctcaaaagcacaagtgttatgattgctggctcctagttggaaacaacatgaaacagaatacagaagtattaagataaaatggccagttccctagagtcatctgttatgtgcctactttgtgtgtgctgggcgcagtgcgacacataaaagatgagtaacacttgatacctgctctccttcatgtatctttctttctaagtcaaatcacagtttggttggaaagatgtgggaggccaattttcatattgcagtgattgcagctgagcctcattcttaaagcattgcttaacacagtacctcccaccattcttcaaaaagtcgaaccacaaaattaaacaatagcagagggagagaaaaaactagaaagcagagtcaagggagaaaaaatatgttctgtgcttgtgaaattccctcccgaaatccttgttctggatgctcacaagtcacatggacctctgggcttctccaggcaccaggtccctagaagggaatcacaccctgccrtgcacgtgcggctcagctctgaaactgagcttataaagatgtgtgtggccccttcctccctcggttctgttttatgcatgtttcaagaccatgaggtccctacgcagacactgagttttatttccagttttaaggtttttttttttttttttcttaagtcacatatctttcctcagcttttttcttctaactaccttcatactctctcttttcccataaggactgtggttcagcttctggcatgtttgagaattggtctaagcccataattacatcagtgccactgccggatttatgtctgtgcaccttcttggcctggtgcctcttggcatttaaactattggcacagaccatcttcttgtcattttgcttactgacctcagaatataatttccatgataatgcttctatccctggataggaataggtgggccattctgtgtatcattctttccaattaaacccaagtgtcactcctcgtttctcagatgattacaatctcccggcctcaggaaattctctattttactccattagaagatagacgctccagataaatactgattattatttctaaatacagtttggtactgtttcccaaattcgtttatgttcatactggctttatgggcttttctctcaaatttaaactattttccaatctactgcttgtcattccacacacatgcagataattcagaatctgatcttcctctgcagtcttctctttagccctaggkggagtggaagtagaggggaaagccttcctataacagataatgagtctccatgttagttccatcatcaggattgcatcagccactttcttcccagatactatcagcayacagggcagaatgaggcagattttagtgtttgcctcattgacacagttataaagatgagtgttgtccctccagagtcttcagctgaattgaaagaaacagttgttcccaggcagcagacattatgtctctctcaccactgttttctgaaggaaattttcagagacagaactaatccccccaccccaaatttattcagggctctggagtcctggtggttttggtttctaaagtataggttgaatgttgtgcctcaaatatttttcttaagtatataaaacccaagaagtggaatgaaacctgtttgtatcagtctaacagcactgtattttcttttcttttttttttttgtttgtttgtttgtttgtttttttgtttttggagacagaatctcactctgtcacccagggtggagagtgcagtggcgcgatctcagctcactgcaacccccacctcctgggttcaagcgattcttgtgcctcagcctcccgagtagctggaattacaggcrtgtaccaccatgcccagctaattttttgtatttttagtagagcctggcttttgccacgttgcccaggttgatctcaaactcctgagttcaggcagtccacacactcggcctcccaaagtgctgggattacagacatgagccaccgcacctggccaactactgttctttcatagatactgtgcagcttctgtttttaacattgtgagtatttacctgcataacctgaatgcatctaatttatagatagtttctgattcattttcccagttataaactgctcctttatggttcttcttcccctctactccctcacacaagtccactgattctcatgatttggtgtgatcacggatacttttggagaataaatgaaagttatagaccattccttccagaagaagtacacatgcacacaaacatgtaaaatttcatgaagcccttcaggggttttacagactcactgaaactccttggagaggtagacgtagggaaaaaagcttgttctaagactcatggagatttatggatacagytgaaatcaagcactatcccagggagtaactgtactaaataagtaattcttagtctcagggaccagtgctttatgccccctggtcctacagtctgtataattggtataaaagcattttatctagagattcacagaatgcttgttctagctctactgatttggcagtttgggtatctgatggaatctctctggccttggttttgtgacctacaaaatgaagagattggaatatcagtgattcctatcttccagggaacccagatataggaagcaaataaaagtggaccagcttcgtcatagcagggtgggaaatacacacatgcccccttcctgggttatcttgtcctggttggaaagctgctgggccagaggacctctcatagcccttttaggttgtggatggaccttccttctgttggccactctgctgggaacagtctttctactgctgggatcagcttaatttggggaagcatctgttctacctcttttaatattccctccagaagagagtgggaatgttgcagtgaagtattactgtgtgttaaatagcatgtggtttctgaggtcctcatcagttcacataacccagcctttcaaagaattttacatttttctgtagttgtcagtttagtttaaacatattttgaaacttatgttctgtgacagttggttgaaaattggcttagagcctccagcttttagactgtctagtaatcatcgttctacataatttatgtactcatgtcttctgaaaagcaaaagttaaattgaagtaagcattttttcctacttgcaacatctctaatcaaagtttaacccccttttaggccattttcctcatagtgtataaaaaaacacttgacttcagtgagtgttgtcatttgggagtggcattccaggcaaaacctttcaccttactcctatcaaggggtcctgcaagaagtctaaagggacactgaatatttgctgtcatagcatgagtgcattaaataaaggcacatctacttcttaaatctttagagattgtctttagctttaagaatttctctaaatatatgttctacttaaaaagtagtcataaagcacaaatgaagctaataaatgctcaacagacattcctttaaggaaaaaaatttgtgaacaccattggatgccaagcagatgtttggctttgaaaagacttttacaaactgttaatgaatgtcaaccctatatttgcttccaagaaaatatgaataaatgttggaaatgttgagagaatatttctttcatacgtgtacagctaaaagaggacacactgaatacactttataacttcataaaatgccaatagtttgctttaacatagtaatcatctgctcagccctgtccatctcctttgctattccaccttgactgagtagtattaaaggaactgcaatggctatattacagcctattagccaattatgatgaccaccaccaggtaagtctatatttgacaataaaatgtctaaaaatatataagaaatctaaatgctacagaagcctactgtaattcaacattttacagttttaggtgtgactccttttaggtaaaccatcatcaccattgccaccatcaccagtacacacacacacacacacacacacacacacacacacacaacacaagcagaactgcagattacataattctaatgaggtaggtaacacgtaatggagagtacataaagtataaatgcacccgcttgggattttcgcaaagtgcacacactcctgtgacaagcacccaagcaggagcagcccccaagaagcccctcatgctccctttagttgaggagcctcccaaagataactgctaccttgatttccatcaccatccctcttattcattttactgttttgtttcatactaactttgaataaacatatataccttccacaaccacatccaaattcttgatgactcttttctgttccacaaattttaaatgcagtgctctgtagctttctactgaaggcctccccaaagctttacaaaatcagtcatcagtacatcagcactctcctctgttcttcagtraaatacaaatctgcctaatggattgcttacggttctctgacagttctgatttgctaagaacatgatgtgtggaacctatggcatttctctgacctgtcagcctactgacctcattgtgtgggaaagggaagcagagttagctttgtgtaactggttctccctgaacccatgatggtttccagtgattacttccttttcagtaaacggatctgagccattttgacttaggacaagttaaagaagggcttggtgttttgagcaaggtggggcatatattttctgtgcagggacagatagtaagtatctgtaggctttgcaggccatacagctttctcccttacagctactcaactctgcagttgtagcatgaaagcagctctagatgatttgtgaatgaatgggtgtggccatgttccaataagactataagtaacaaaaaccactgctgcttaaatttagccctggggccataataaagtgtctgtagctcatgaatgaacatggaaggaggtagttaaaacagaactttcctgcaatactgatggaattcatgctaagctctcctagtctctccaaggagagtaatttctagactgttcctttcttttctcaaaaattgaaacatttcctcatctctcctcactggctttctccacaattccttgaaaaaatggacattctttttatggtgccagctgcacaatctggtggctccattaaacttatccatgccatcagaaccaagaaaatccctaaaaataaggacatgaatttgttttacaatgaggtgtcaatacatacttacacatagcagcaggacagaaaggaagaacccagggccataaatatctgaccctgctcggtcactgcggtgccttccctctgttctaggaaaacccccagcaaggtgctagaggacatgctagcaaaagaatgaggaagatttgcaagctagccatctccctagagtcttgaactaaagcaagtggctctttgattttttatgtggttttttttktgtgtgtgtattccccttatccccagtcccattctatttcaccttagaaaaaatattctcaagtgtttcatatgttcccatccatttgctgtactttagttgtatatatgtgattctgtgaaaaatatctatcatatgtgtattgaattgaagaaaagctttgtgtttataatgacactccagtaaataattttttttgagatggagtctctgtcacccaggctggactgcagtggtgcagtcttggctcactgcaacctctacgtacgccatcccccagccccagactcaagtgatcctcctacctcagcctcccaagtagctgggaccacagatgcgtgccaccacacccagctaagtttttgtattttcagtagagatggggttttatcatgttgcccaggctggtctcaaactcctgagctcaagggatccacctgcctcagtstcccaaagggctgggattacaggcatgagccgcccgccaaaaaaattttttacctttatttttctacatgtttttgagacatatccatgtcactatatgtagaacgaatttattttttgtttgtttttgtttttgagaaggtagagtcttgctctgttgcccaggctggagtgcagcctgatcttagctcaccgaagcttcgacctccaaggctcaagctgtcctctcacatcagcctcctgagtagctgggataacaggcctgygccactactcccagctaatttttaaacttttttttttttttttttagagacagggtctgcctttgttgcccaggctgttctcaaactcctgggctcaagtgatcctcccacctagacctcccaaagtgcagtgattacaggcgtgagccactgcgcctagccaagtttgtttattcttatcactgcttgttattacactaatgcatatacatcattttatttatctcttctcatagggataccacagaggtttcctccaaatctttgctacaatgaaacgtactgcaatctatatcctctgtatgcccccaggcaagagtttttctaggagaaaactcttacatggggagagagagaaagagagggggatgggtatgggattgcttggctgtggcgtatatgtataattctttcccatcagaattgccacattattccaaaacaactctactagtgtgccatcccagatccatggaatagagttgctgtttccctaccttaataacaatacatagtattactgaatttataacttggccaatttgatggttgtgaaatgacgccttgttgttttgattttaatttctctgattactagagaggttgaacatctcacaggagtatttacctttctcagtttctgcttttgaaatttattcattcacttattcattcagcaagtgttttttgagtgctccctgtgtgccagtaaccttaataagtactagaaatagagcggtgaacaatgggaaaaaaataatcccagccttcacatcatagctgttgttcaataacatcagtaaatatacacacaaatattcaaaagacaataattgctgtgtgtgtgcttgtgtatgtgtgaatggtaataattgatatatatcaaacagacatatataaaatcagtggtaatattgctatgaagaaaagtagtacgctgaagaagggaaagggatactgaaatttctgttgggtttcttctcttttttcctgcttgtatatgagaactctttgtgtattctggacattgattttttgttgttgttgattattgatgtagcaggtgtcttctaggctggctcccttcttaattttgcctgtgatacccttccttaaacagaaatcattggctttgacatagtcaaactccactaattttttccttttatggtttgcacttttgggatataaaggacttcccactcctgcatgttcttctgttaactttttttttttttttaacctcaccctgtggcccaggctggagtgcgatggcacgatctcagctgactgcaacctctgcctcccaggttcaagcaattcttctgcctcagcctcccgagtagctgggactacaggcatccaccaccacgcatggctaatttttgtatttttagtaaagatagggtttcaccatattggccaggctggtctcaaactcctgacctcaagagatccgcccgcctcagcctcagcctcccaaagtgctgggatgacaggcatgacccactgcaccccgcctcttctgttaactttacagctttagttttttcatgtaggtcttttacacatatggagtttatttttgtatatgctaggaaggaggggggatcctttgttattcatttctgcatcatgagcaaattctttcaatagcatttactaaacaatccactcttcttccctctgctggtatgccctgtgctgtagtgctcaggaactgaggccagactttccagagcctagactctacctcttagtagctgaacaacaggttacttctctggttttagtattttaatctttttttttgagatggagtctcactctgtcgcccaggctggggtgcaatggtgtgatctcagctcactgcaacctctgcctccccgggttcaagtgattctcctgcctcaccctcccgagtagctgggattacaggcgcccgccaccacacccagctaacttttgtattttcagtagagacctatattttaccaagttggccaggctggtctcaaactcctgacctcaggtgatctacccacctcggcctcccaaagcgctgggattacaagcatgagccacccagcccggccctggttttttaatctttaaaatagagatagaaattgttcttctcatagagttatgaagaataaatgagctaatacgtggcacctattattcaaatgtttgttgctcttataaattatatctaattttctcttatatagcctaattgaatatttcaggtgaaatatatattttgcctgacagtatatattatatactgtcatatataaagatttctctctgaccgttatggccttttctatgtcctgaattttttttttttttttgtctgatatttaatttgctaacctggctttcctttgtttcattatgtgtcttgtcttttgttttttctccaaatccttatgttcaatccttctgtataatatagtggttaacaatgctgtgtctgtccagcctgagcaacaaagtaagaccttgagtctccaaaaaaattacaaattagccaggtgtggtggcatacacctatggtcctgagacaggaggatcacttgagcccaggaggtcaaggctacartgagccatgttggcaccactgcagtccagcctggcgacagagtgagaccttgttccaaaaaataaaagaatgctgtgtctgaatccacactgcttgggattgaatcctagcttcatcatttgccattttaccttaaaccttaataaatattgtttgtgccttggattcctcgtttgtaaaatggtgacaataataacttatgggattgttctgagaattcaatgtgttgggtgcaaataaacattatattgttattataattgttgctatattggacctcatttcttcccatttattttggtttccatctattatgattttgtttcttttttttttctccccctaactttcactctctaggtcagattttcctatgctggtttgaaacttttgtactctattctgtgagggaccctttcccctattgtttctaacaggcattaatgtccctttggaggaacagcaaaagctaggtcctgattaggtaaatttggaggcagggcccaatctcagttcattaaatccctgttttcccctagtgcctttacctgagctctcctcttgttagaggcagctgcactctgatggaattccccgtgtgaggtggcattcrggggtctgtcagcacagccatattactggcacctgtccctgcctggctctgtgccttcaggttgaccaaaagatctggctttcctgttccaaggcatgcgtaggaattctttctgcagttttagctttagggcactgaggatgtactcctggaattggagtgttttgttttttaagcatgttattttgggtttgatttcataagctccaaacctaagccaaactctacagttggaatgagtgaggctccatccagcccagtctcaccccactcatgctggtcagctcaaacagggtgccatgggcagggaacaatgcagccagaaaccttgcccatctgtgtgttcttccattatccctcacatgccactcttttcctccatgccgctcagcttctcccaagtattcaccacttcctgtcgccccaaaggtttctcttgaatttgtagttgataattatgaccctgaactttactggcctccttttttaactcctgacatcttcagagttgtattttagtttctgtcaatagtctgtgcgaccaattgttccaccttccactaggtagttttaaggtgagagaaggttccttggagaaacttatccacacaacataggaaggtcatgaggcagagaagagcaagctgattttcttccagcctaaacaagctctgggctgtgcatgatggctcacacctgtaatcctagcactttgggaggctgaggtggaaggattgcttgaggccaggagttcgagaccagcctgggcagcatagtgagactccatctctacaaaaaaaaaaaaaacacaaaaattagccatgcatggtggcgtacatttttagtcccagctactcgggaggctgaggtaggaggatcacttgagcccaagaggttgaggctacagtgagccaagattgtgccactgcattccagcctgggcgacagagcaagacctcatctcaaaaaattaatttatcaatttaattaaataaawaaaaaaactttatcccttccttacctccccagagtcataggaaaagagatcacagggcatgtgtgctccagtcagacactgggaatgggaagggaatggaggccactctgagaccaagctcacaacagggtagagctgaaaggggaagcactctaggccttcttgaatagaagtgcttcccagttgagagcacaccagtcccattggcmaggctccctaaatagagaggtggcatggcgttgatccatgcaggaaaaatttctgtctcttcagagcaggtgtacagagagggactmctatcatataggctgtcaatatttaactcccgggacagtacctcaataaaagtccttaaattaataactcttgggggcagaagaaagatcctgagatctgctttattctccttgtgttcttccgcagagctttaatcacatactaaaggatcacttaatacttaagtaaatacttgaatcaatgacacctggaggcacattcccaactctacactcttttccaagtccaattccaacttttcagtcagcatgcttaaatgagtctgccagagtatcccactrctatctaaacttctgagtatctagaacttccctgatacttttccgctgtcaatattcttcttgccttttccatttacgtttagaccctcattctcccagtaacccaratttgaaacctcagggtcatttttgaaaccacttttatttggggccctctgtgtttttattttcattttcattgtccttttcctagatcatattcagatatatataaaacatactttggtcaatccaaattaatgtttttaggaactgcctcaaccatgctcttttttttctttttctctcttttttttttttttttgagacagtctcgcactgtcacctgagctggagtgcgatggcgcgatctcagctcactgcaactgcaacctccatctcccaggttcacgcaattctcctggcttagcatcccgagtagctgggattatgggcgcacatcaccacactcagctaatttttttttgtatttttagtagagacaggtatgttggcccgactggtcttgaactcctgacctcgtgatccgcccacctcggcttcccaaagtgctgggattacaggcgtgagccactgctcctggccaaatttctctttcttgtaacatttccatttatttggttccactacctttttttttttttaactgtgaatttactagccatttttgtttacaatggaaactctgggaattcaaaattaacatcctcgcctgtgagctgcttatagacaccagaaaaagtttcagccttgctttccatgttgttctcctatgctttgtccaaatgaacctttatgagccggctgtcatccagtttcacacagattctcttgcccacaayttcacttgggaagatcaagtcctcaagaattgtgtcatatacagctcctaggatgtttttgcttattttttgtatggctttttcaagctggcttaggcagaattctcctctgagcaataaagacagcatgcttcccactgaactttttctccaattcacgtactagccagagttggattttctggaaagatttcagttgaggaacaggaacaaagattatgatagctttctggacaccaccaacttaggctctttggctgctgtaatactcagcttcctgagctgagccttgaggtccgagtttatctccagctccagaagagcctgaaagatgccggactcttaactcgtttggcgtctcgctgttgggcttcacagtcttggtgcttgaaatgaacatggccttctccttgctaagcgccagcctaggaagagcttgctaccatttttaattctgccttgtgctgagtacagtgctaggttcaatataactagatgatattttctgaagagaaaatgaacagcaatattgtagataaactaagctttcttgtgtgaacaccataataaatatctatactaggcggagttctcttyttagtgcctttcataggtctatttgctaattagtgcacacatgcacatacatgcataatcaaatacacaccatcaatagaaacggtccctatttaaactacttatctgaatcattgaagcagaaggcagtacgtttacctataaccacataaattctacaaaagagaggttttatatctaaaatgcattgcagaaaggaaatcttttttaaatttgctttccttttttgtcctatggaaaggctatctgtattttatttctgtagactcagtctctatattgtaaggtctcctgaatgcctatgactgcacagtatatcaacagatgttggttttggaggctaggagagctctcactcatcagtcatttgaatagcgcacttctaggtaagaagtggttgaatgtttcattatgtaccatattgctaagtatcatttttaagacttgctatgtaagctgctgttttcattccaagtaacaagttgatggtgagcttctagaggagttaacaatattttgtagtttttgtacatcakgtttttttttgctgtatcttaattttttctcaatgtgaaattttataaatgaacctgccaaattttagttcagaaggattcaagtaagatcttctagtttacgtttttctctccttttgtaatttctrtaaatagtcaacaaaatatgagtcagttggaaatacactgatattcacaggagaaatcttaggaagtttgttgcaaagaaaagcacagcagatcccctcactaatgattctgacctctaaataggcacctggagcagacctcaaatttaaagtttgaggaagttaaagaaatttagtaaatactgggcttggtcactatataaaacacttcaggagaactagaaaatactatgttccttcatattcttctaaaaagttttctagatttaccttctaaaggcaacttcatagtaatttttaagtttccagtataagtctttgagatcatattatattatcagtataattttgtgtatatgtaagaattttttaggttattaatcccaaaacacaatccagtggataaattattgtattccttttggctacctataaaaaattccttaaattatcctttattatacatctattatatatatgtacatatattcttcatatttcatttagaaaggtgattcatttagctaatcccattaagagtgcaaaacaagcttcatgtaagatggaccacctatatacttcttagcttaaatggtaaaaatttccagtgctctgatctaacgttcacagggcagtgagagttactgcatagaaaataagaaaaataatgaataacatgtgcagaaactacagccaaaataatatctgaaaagcatattgcactcagtgcacgtctaggttgtatcagaaaggaccaccctctgtttgtggagccacagggaagagaaagggacgtttacagtacacattggatacgtagtctttttccatggagtctcttctaccaaagaagaaaaagcaacggtggaacagaagataactgtgaataatttaaatcctggatgcagacccacaaatggttaaaataaaacaatctcagggaagaaaacagtgcctttatgatgtttcagaattatacgttgagtcactattggcatttgtttaggttttagatattctcagccatggatatgtgattttttttatagacataggaagaattaagttgttgtgtggtaaggtagttctagactcatggaaattgtatgaatctagaagcaagtgtactgacaatcaagaaagtaaataaactctgagtagagtaatcttttaacaggtggagacacagcagtagaaaataatatattctggagaattttgagtgtgaagttaaaatttattatgtgctatttctgttacctgaagtgaactctcctctcctttcaaaggccaagtcaaattctaacttatcaagggaggcctcttaaagcccatgttgatttctgaaattatcaaagaggggcaatcatatcaaagctttatgctacattcatttttaatgtcttataattttgttttgctatattgtaacccccttgtagcaaggaaccattttttaaatggatgctataaaaatagtggatcttttttactgacttcagcttgacaaacctgaatccctttcagccacattccttccctacagccttctgccaggtactcacagcacactatgctcacacccagaggctcttgggtgtgtacatgctcttcggcttccatgaattgacttggtgcattgtaagtggggctcgttccctagtacgtttattcctgttgtacttcttgaaataatcatttaattaaatatctcataacttcattcaaataactgagtaaaaattattgctagtaaatccaggtataatgctctaaaagactttttgagttgctaaaaaatattgctgtcaaattttggagtaaactaactataaactggggtaaaaggaatcagtacattctggtctccattttagtgaggcaaaccattgactatgcctgagtgagatttctgctacaaaaacatgcagtttcaaacagcagacccctatgcaaagtaaggttctttgacctgcatcacagtttgtacatttatattttgagttaaatattttaagaatgtatattttattttgtatgaatctccacttaaatctgacatctttgtttagcaaccaactgatgtttcagaatcataagaaaaggcttccattatgtcttttgttttaattttttatttccataggttttgagggaacaggtagtatttggttacatgaataagttcttcaatggtgatttgtgagattttgtgtacccatcacccgagcagtatacactgtacccaatttgtagtccccctcccaccctttcccctgagtccccaaagtccattgtatcattcttatgcctcttcatcctcacagcttaactcccacatatgagtaagaacatacaatgtttgtccattcctgagttacttcacttacaataatagtcttcagttccatccaggttgctatgaatgccattcattcattccttttatggttgagtagtattccatctcattcatatatgtgtatgtgtgtgtstgtstgtgtgtgtgtgtgtgtgtataaaatatataaaatatgtatatataaaatatatacacacacatacatatatatacacacataccacagtttctttatccgcttgttgattgatgggcatttgggctggtcccatatttttgcaattgcaaattgtgctgctataaacatgcatgtcccagtagcttttttgtataatgacttattttcctctgggtagataccccatagtgggattgctggatcaaatggtagttctacttttagttctttaaggaatctccacactgttttccatagtgattatactagtttacattcccaccagcggtgtagaagtgttccctgatcaccgtatccacaccaacatctattcttttttgatttttttattatggccattcttgcaggagtaaggtggtatcgcattgtggttttgatttgcatttctaaagagcttctgcacagcaaaaggatcagtcagcagagtaaacagacaacccacagagtggaagaaaatcttcacaatctgtatatccaacaaagaacaaatatccagagtctacaaggaactcaaacaaattagcaagagaaaaaacaatcccatcaaaaaatgggctaaggacatgaataaacaattctcaagatatacagatggccaacaaacatatgaaaaaatgcttgacatcactaatggtcagggaaatccattatgtcttcaatcttattccaagagggtcatccacttttgttttcccgagatggagtcccgctctgtcacccaggctggagtgcagtggcgccatctcagctcactgcaacctccacttcctgggttcaagcgattctcctgactcagcttcccgagtagctgggactacaggcacgcgcccctatccctagctaattttttgtatttttatttgagattggattttaccatgttgcccaggctggtctcgatctcctgacctcgtgatccgctcacctcagcctcccaaagtgctggaattacaggcatgagccactacgcccagccagtcatccacttttaaagcttggtaatggaagcagatgctctggctagtagcagctgcagtgtgcttttgaaatgtctctcactatatcattttcttttttcttaaatgggcattgttgctaagggcaatcctactctttaacacctcatttaaccatacagaattgaatgaaaatcctcagccaattttaatttgggtgttgaaaattacagtatcaagcagagaaagcagtggttggttgtgatcaccatgaagaaaactaaatttagtccaactcttttctgatgctttttaaaaatcactaatgtcagctcaccttgcagagatttctcctttattacaagtttagttatggaaaaagtaccactgtttcctagttctgttgaacccttggtgtaacttcataatgtattcatactgttagactattaaagagaatttgataaagctttcaaatgcttctctctattcatgcccatttcccattctagatcatttattggtgagcattcctttttgacatttactaaatgtcaactrtagtccaggtttaaacattggcctacagccagtggacttaccagtttatattagcctggtaagaaaaattaaataaaatgtgaaaatgaaatgaaaattgctttgaagaaaaatcaagctaacagtgaaatagcctgctaatggcctgataggcattcatttccttgctgagttcacagttgtgtcattttgtactattgccagactgtaaaaggaaatccaaagaaaaaattaaaaatggttttttcgtatagcaaccatgtattgagtatctattttggatcaggcactaaaaatacaaagaagaggagaccaattgactttacaggcagctcacagtctaatgcaatgattctcagacttgaaataaaaaccagagctgctctggctgaagcagttcataagggcagtggggcctcctgaaggcacatatttgtgcagagtatctaccactaaaaatttttcctatggaatgatcaggaaaatggacaaagttgtatcgattctctcaaagtggtgatcttcatttttaaatagaatagtaaatgatttttcagatgttttagcagatatttattattagtcatctatgccacataaccttgataaataatttagctctgagatgtttttcttgtttgaacattgtgtacataagttgtttcttactatctaattattagcttaactgtttgttagaacaatttattgtgtagttttcctgtctttctctatagtttccaatacagtgtagacagtgtgttatgcattctgtctttgaacccttctgtccttgtcctagtgtttattcctttttttttttttttttttttttttttgagacggagtcttgctctgtcgcccaggctggagtgcagtggcacgatctcggctcactgcaasctccgcctcctgggttcactccattctcctgcctcagcctcccaagtagctgggactacaggcgcccgccaccacgcccggctaattttttgtatttttagtagagacggggtttcaccgtgttagccaggatggtctcaatctcctgacctcgtgatccacctgccttggcctcccaaagtgctgggattacaggcatgagccacctcrcccggccagtcctagtgtttatttcttaaatggctttagaaagtctgtgaaaagtaactccaaatctaataccagatatgattttaatagagatactggtgttttctgttcctggtccacatttgtataagaggttgcttgatttttacttgacccttagtggctttggaagaaaatgaagcccatgaactataatcagatacttggcattttccatggtgtctgagaattaatttaagtagagttttaagygtatagtacattatctaagatcagattgcagaagctcaaaacttttactttccagctactatgtaggatttagttagtgtttggcagcatttatgacattgtttttaatttgtaagtgaagaattagaaattctgatgtttgttaggaagtaaaggcattctggcaggctaatgtttaacaaagcattctctcttctagatgtcacctaggggtttgcctctgaggcttgtttttatttattttaattttccttaatacagtaaccaggttaacagatgagtaaacatttgcaaacctaaaactttatcataaggtttcttcagagaactattcatttaggtcttttgcatcttttatccttcaacacgatggcatttcaaaattccttttttcagaaaacagtaattgataatgtgtttcaatttcagggtttctcctcttcaaaaatctgaagttgttgagatggttaagaaacaagtcaaagtcgtaacgcttgcaatcggtgatggagcaaatgatgtcagcatgatacagacagcgcacgttggtgttggtatcagtggcaatgaaggcctgcaggcagctaattcctctgactactccatagctcaggtaaagcgtcatttctgcaaaacacatcattcctctcagtcaactgatgctttgaaaaggaaaatactaattttttcccactcttgttttagttcaaatatttgaagaatttactgatgattcatggtgcctggaactataacagagtctccaagtgcatcttatactgcttctacaagaatatagtgctctatattatcgaggtaatagcaggttaaattttaaatccttgtcatttgcatacatatttaaagaaattttctttatgragacgttttctcatggttttaattaatattttatttgccaactctttataaattctaaatgtattaaaacaaaaaggtggcctgtaatcccagcactctgggaggccgagataggcggatcacttgaggtcgggagttcgagaccagcttagccaacatggtgaaacctcgtctctactaaaaatacaaaaattagccaggcgtggtagcaggcacctgtaattccagctactaggaggctaaggcaggagaatcacttgaacccaggaggcagaggttgtggtgagctgagattgtgccactgtcctccagcctgggcaacagagtgagactccaccycaaaaaaaaaaaaaaaaaagtttgtcagccatggagaattatgtttaaattctagctaaaaatgttatgttgctttgataagaagtgttgaattagagttgctaatgagataataatgtatttaatgtaaaaaatacattattaataatgtataaaagtctataaacttgactgcatttttaataaagctcaaaaacatgcaaaagaaagcaatacaccatggagggataacacacatgtagaaaagctattttttaaaaaaggtgagggaatgagaaacatcaactgaagctagcacctctaattctgggaggagacaaagaagtgcaatcaggaagaatatgcaggtagctttgctggtattgttgccttgttgttcctattatgtttcaaaacttagatctttgttacatacaagcatccctctctatccagatctgtttttgtttccgtrtttggtgagtagcaagagttcagatgaygaaaaatttgtctaaaaattatcagaatatttagtttctgtctggatagcaagggatttctataatccgttttatgtgtcaaacataacatcattttaaaaatgaaaacctgagtcaggaataccacttttaaaaggatgcattttgttctgtaaacaattttgtagcacctactgagcccagacaccaggcttagtccaacaactacaaagtaaatcaagcatggttcctgtcctccaggaacttgctgtattactgttctcacactgtggataaagacatacccaaggctgggcaatttacaaaaggaagaggtttaatggacttacagttccacatggctggggaggcctcacaatcatggaggaaggcaaggaggagcgagtcgcatcttacatggatggcagtgggcaaagagagcttgtgcaggggaactcctctttataaaaccatcagatctcaagatggttattcactatcacgagaacatcacaggaaagacttgcccccatgattcaattacctcccactgggtccctcccacaacacatgggaattcaagatgagatttgagccaaaccatatcattctgcccctggccccttccaaatctcatgtcttcacatttccaaaccaatcattccttcccaacaataccctaaagtcttaactcatttcagcattagttcagaagtccacagtccaaagtctcatctgagacaaggcaagtcccttccgcctatgagcctgtaaaatcaaaagcaagttagttacttcctagatccaatggatgtacaagcaatgggtaaatacagctactccaagtgagagaaactggccaaaataaagggaccacaggccccaggcaagtccgaaatccagcagggcagtaaaaccttaaagctccaaaatgatctcctttgactccacgtctcacatccaggtcaagcatgcaagaggtagggtcccatggtcttgggccrctctgccccgtggctttacaggatacagcctccctcccagctgccttcacaggctggcatcaggtgcacaatgcagtcagtggatctaccattctgaggtctggaggacagtggccctcttctcacagctccactaggtggtgccccagggggaactctgtgtgggggctctgacctcacattttccttctccactgccctaacagtggttcrccatgagagccctgcccctgcagcaaacttatgcctgrgcatccaggcatttccatacatcttcagaaatctaggcagaggttcccaaaccccagttcttgacttttgtgcactctcaggctcaacaccacatggaagctgccaaggcttggggcttgcaccctgtgaagccactgcccgaactctatgttggcccctttcagccatgtctggagcgactgggatgcagagcaccaagtctcttggctgcacacagcacgagtgtaccctgggcctggcccagaaaaccactttttccttgtaggcctctgggcctgtgatggaaggggctgccatgaaaactctgacataccctggagacattttccccgttgtcttgaggattaacatttggcttctcattacttaggcgaatttctgcagcctgcttccatttctcctcagaaaatgagatttttcttttctattgcattgtcaggctgcaaattttttgaacttttatgctctgcttcccttacaaaactgaatgcctttaacagcacccaagtcacctcttgaatgctttgctgcttagaaacttcttccaccagatactctaaatcatctctctcaagttcaaagttccacagatctctagggaaggggcaaaatgctgccagtctctttgctaaaacataccaagagtcgcctttgctccagttaccagcaarttcttcatctccatctgaaaccacctcagcctggatcttattgtccatagcattatcagcattttggtcaaagccattcaacaagtctctagggagttccaaactttcgcacgttttcttgtctttttatgagctctccaaactcttccaacctctgcctgttacccagttccaaagtcacctccatgtttttgggtatcttttcagcagcaccccactctactggtaccaatttattgtattagtctgttctcacgctgctgatgaagacatacccaaaactgggcaatttacaaaagaaagaggtttaatggacttacagttccacatggctggggatgcctcacaatcatgacggaaggcaaggaggaacaagtcacgtcttacatgggtggcagcaggcaaagcaagagaacttgtgcaggggaactccccttttcaaaaccatcaaatctcttgagacttattcactatcacaagaacagcattggaaagacttggccccatgactcaattacctcccaccagtccctcccacaacacatgggaattcaagatgagatttggctggggacacagccaaaccatatcacttgccaacagaaatacaatgcaagccacattagcaaaaagcaaaaaaaaaaaaaaaaagaaaaaattgatctcagtatattttatctagctcaatgtattcaaaagattatcattgtcacctgtaatcactgtcaaaaattattaatgagacattttacatccttcatcctaagttttcaaaatctggagtatattttacatttataccacgtctcaatttggactaatcacatttaagtgttcaagagcacgtgtggccagtctctaccatgctgggcagcacagcagtggtagataaataagtgaactgaatggttaatcaaggcatgataaatatgttatttgcctttttttaaaaagttgccttcttattgtcagaagctatatgtgtagtaattctaggtgttatcagtttcatgtccctgttggagctctgcagatcatgacaatggccttcccattgttaagaaaacctcattctcccactcctgtcaaggacccaccatggtctcataaatctgctgagggttcccttacagatagatgtttgtttctgccactttaccatttaatctgttgactgtttctacacgtctgtcaaaaaagatacagccaggctgggtgcgttggctcacgcctgtaatcccagcactttgggaggctgaggcgggcagatcacaaggtcgggagttcgagaccaacctggccaacatggtgaaaccccatccctactaaaaatacaaaaaattagctgggcatggtggcagttgcctgtaatcccagctacttaggaggctgaggcaggagactcatttgaaccagggaggcagaggttgcagtgagccaagactgtgccactgcactccagcctgggcaacaaagcaagactccatctcagaaaaaaaaaaaaaaaaaaaaaaaagatccatccatttgctatatggaaatcatattctatcctttactctgagaagtaacagtataaacaaagtcagtacgttgacactttcgttgggggctggtgtatatttgcttcacctgttctttgtgcctctgtcagaatgcttatctccttgttaaatgttgactgagcatagttcttattatgagtcaggctagtaaaattgaaacttagttttgaagtgtacaggcagtttggtgtaatggtcactaaaaaggttacaacctattagataaaataacctaatacaggccaggcgcagtggctcacgcctgtaatcctagcactttgggaggccgaggggggtggatcacgaggacaggagatcgagaccatcctggctaacatggtgaaactctgtctctactaaaaatacaaaaaattagccaggcgtggtggcaggcgcctgtagtcccagctacttgggaggctgaggcaggagaatggcgtgaacccgggaggtggagcttgcagtgagcagagaccacgcgccattgcactccagcctgggtgacagagcgagactctgtctcaaaaaaataaataaataaaaatttaaaaaataacctaatatgtggaaatataaacaagatacgtaaatgaacttactcgttcattactgctagatttggtctggaatagtgtgtgttttgaagcaaaatgcacttctaaaatagtttataagattcaaaaaaatattctttgttgtttatataaatgtgtagttcttttctaaagtaattatttttctattctcaatcccttctatatatctagcttttctatttatatgttcttctcattccagaacactgacattcaagcaaataacaatttatacagtttatttacatagatttatcaagataccaggaatttaaagccactgccagcaataaatctgcttataaaaagttaattttataaaataagaatgtccaacttgtcgctttttaaatctaaattgacagcaataaagtagacaaaatttatgtactaatgagaaaataaaaacattaaaatcaaatgaaaacaatcttcatgccctgtcctgtttcaaacccagaattatgtgatttgtggttgattaaccctaaacttcacttgcctttgattttaaaacctgttcatgagatatttgacactgatcaaattctttacacagtgaaaaggaagtgagttctaaactttactggaaatctcatttttatttttctcaagagtttgtggaaatgtattttgaatatgattcaactgtcttggtaatgaccttttaaatcaattcccagatacccaacttttgccagctaaaacaagttctgcagatgttaatggctcatgtcaatactgtgaatgaatagacagaaaacacatcattgaatgtctctagtgaggacaactgccagtctcgaatctctcctttcagttttttgtgctgatcaggcgtgggagcagaggactcattgactgtttgtaagctgctgtttaatatgcagaaatgctccatcaggaaaatgaatgtgaagctttagctgccacgcctctactgggaggtggaatttagaaaataatgccaggagaagcaggtctgaaatttctwtgctaataaaggaatagtcttgaacactatgtgttttatagatttaaaactacaaacactgcttttctccttgctatattgcttaggaaagtcactatctagatattccattgctgtaaattacagccagacgaatacagatttggcagatggtggtataaagctctttcttacaggagctgcccaggagcagctctaggtgttcatttaaattattggctccttttaaagagagatttttttttatttctctgatatgtctgactccttcctcataaaataagacctttcctttcaaatgattggtcacatccaagttttctgggaagatctcaaaaccaagttgtgtttctaatttccagaagctttgataaaagtcaataaggtgatactgtcccagcaagtggtgctgggagttgaattccctgtgaatttaaataaactagacacctccccagagggaccggtgttttctttctgaatctgtggctctggttgaattagaggaggtacttttatgtgtttgggataatttagatgttgttttattttgcacgggatatgttcctaatattaactacaatctcagcctaacttgaaatcggcctgctggtaggctacttcactgttaaagaccttctctttctcctttaagatatgtaaacttgaatattaaaatattagagtgaaaatctaaggtactctattgaaagtttctgttcttacctagtcatttcttctttaaaaataaattaaaatgttaacccttaaaaatccaggaaatacattttctaaaaacatgttcacctacctttcagtaggaaaaataaaatgataaaaatgtgttgatacctttccacttaaaaattgtcgtaaagtataaagcaggtcatgcattttaaaatacactttggaaacaaacatgttagtttacttgcaaattatttcaaatttgaaacttactgtaaatattgatttgagggagaatcttaaatttcaagctcgtagtagcctttgaatcagcaccaaatattaggtacacagaagctaggggaccattcgtatttactaatgtttgcccacatataaacttactaacataaacttctcattgtacggtattgatgattgcaaatgcatttagaactacaacttttgagccaaatcttgtccgttagacgaatttggtatgcagagcgcttcggctttcttcagaccaacaaaggttagactgtgtcttcatagattagagaggccataattggaagtttgttttgaaattccttatatttccatcataccttaagaaatctgaaagagctttttagaatgaattactacaatagatcacagttgccttcatggaaaatagccccatcactctgagtatcccaaatatgtatttacataatccacatctcaggccaaatgtgaaaacacaatagagagcattaatgtctgttttgtcaatttgtgtatactcaccaggaaagaataaacttcacttcatgtgaagatgctcagttcttttaaagtttgcatgcatcaatgatctggctgtttgtttagggcaaattatcaaaaattttccataaatatgtgtagcaaagcaagtaagaatttcagatttgactctgatttctctgcttttgttgtggttaatatgtrttacagctctaacacaatttggacttatttttaatgtgctattgctactttgttttcttttccatctcataaagcagacattagtttttatacatgctcaatcattcctttccactgtaaaaaggaagatcagtgtggctacagaacctgttcatagggaggccagcctgggtatatattgataaatggtgaatttgtagtaattcatgcttccataatgaggttaaatgaaacgtgaagtgtagcaaattccctgcaactctgattcaaaaattcagttgagccgcatgtcaagaccgctctcctctaacagttttgtagttgtcggtgttgttaggttttgtttttgtatttgtgcttatgtaatctcattgctggaccagcctttgtactctcccagatccatttgatatttgatttttaattatacttcaggtctgctttttaaaarcaataacgtagktactattgtttactaattgtcactttaatttttcttatgttttaaacatgctagagaaaaatttgtccatattgtcccttaattttgtttccaaagttaagatttctgttttaaagagaattgtaaaatatataagaacattatgctctagtcaagatgggattttatcaatgaataaaatttaagttaaaatattttaatatataaactcaaatttaagattccattggcagtggttatcaagaactattaagaagactcatgtactttgacctattccaccttaagaattcaccctaaggaaaaaagagagatatatggtttcagtttagagttatttataatagcaaacaactggaagccagctaaatgtccaaaatagttacatccacattgtagaggttacatatccattaacatcattttaaaggatatgtgacaacttaagaaaatgcatattacataatattaagggggtggagcagagtatgacactctctatatgcaggtttccagtaaggtaaatttgtgaatttgaatgaactatacaaccagtgcagacaaaaatggtgattgtactattgcaggaaactatttcctaaataaacaagtgttacttttataattttaaaaaacaatctttaaataactacaatcctgatattttaaaagggaattgaagctgtaaaaatttaatggcatataaatatattctctgaaagtaccgttaagaaaaacaagattatttmtcatttttaaatcgtgattgcctgttcatatatttcttttttgattcagcaagcaggaccaattctgacataaataacaaataccctatgaaagcatctctttcaatcagaaagtaaaccaaagaaatgtcattttcaaaagagtcatgagtataatatgttaatgctgctattatgcagcagttgagtatacaacagattctaagcaatgcatttatgcttttgtattctaatttgggggttttgggttttttttcctagatctggtttgcctttgttaatggcttttctggacagatcctctttgaaagatggtgtataggtctctataaygtggtaagtttaggayatttgataattcctgtttcattgaatacttgggagataaaggttcaccctgcatttggctgcttgacataatgaccagtttgtgcgctttagatgtttacagcaatgcctcctttaactcttggaatatttgagagatcatgcagaaaagagaacatgttgaagtaccctgaattatacaaaacatctcagaatgccctggacttcaacaccaaggtaggacacagtgccctggctgggacatgtttggtgggtctgtgtttactgccctcattatatggggtatgtggttttcaaaggccaaggatacactagcctgagacaactccagggtaccgactatggcaagtcatatttcttaaggttctgatacaggcagagaaggttttttgttggttggttgagtttggggttttttgtgtgttttattattaaaatgtaaccaaattcacttgggtttgtaaggcagcaataaagctggcctgacgtataaaaatcattgtccttttggttctctggccttctgtctttgcagtgttgtggtgacatgctcactcctcacaggggttagtcatctaggactggtaaggactggctttatgtgtgtaaaggagtgagagaggtattttattgttccttaactgattttccattttgtgaaataactttgtcctcattagaattttagattgattgtgtcaggcattaaaattacagtctctgggaaatagtactcagtatttccaagctctaaaattaaaaatacaagataaaatatccaacagtttatctaaaatcacattctgggtgtgatccaatagtatttatcccagacacacacacacacayacctcattttctatatagtttactttcctgcaagtatatattctaaagtgtttccattggtatttgttaataattcaatttcttgtttaatgtgagtgaggaggaaaaaatttaatattacaacaatcaagttaggtgtcattttgaaactaacatttgtatattagtgttrtgaaagcaacaaataaaatacactttcacagaattgtttttgtttaatatagtgcatgtttattagcatgttactgataattagatgtaaccttaactcagaatcttgaattcaggacagttaatgtaggatattttaaatatttaggaattcataaagcttttcaatggcattttccatatgccaagagaataaagtgaaacaggtgttttggtgcctctaacctcacagcataaacgatagtgctaggtttatgggcaagacattattcttctgagacgtgatcttcacgaacacagcgtgcctatgtatccagctgtacacatgcatacaacttggtggcactgttttaaataaatgaatttggttagctcaggacagacagactgaaggattctttaacttatgccattggttctgaaaagtatttttagtggactctcttaaaactaatactattaatgtgcagttatctctgctttcatttttaaatcttttacttctagatttttaaatttatttgtgatgcccagtttgtattaaatttcatcacattgctgtaatgtttttcattacctatggtgagcattcacaaatgatggcaagccacaatcagactatggcctctggttcccctgaaaaagtgatctgagagctggggaagttccaggyctactggttggtatactaacaataattctcaccaaccaacctcagccacaggcctcgtctaccatagtgtgggctccatggtactgtctctgaatttagcctctaaccacaaatttggccatgccattcttgcttaaaaacataaattgatcctcacagaattaccccaaatcattcctgcaaaggcacattcttctgtacatggcaacttggacacatttttgtggccaggaaaagggtatagcgggtagtawattgttttaatgtgggagcatcattcctcgtatcttttattgttgaaaaaagtcttttcattatctgtagagcccaggagttcagacaagtcatcagatcaacccaaatgggttatacaatttctatacccatttgagtgtttatagtttttatacacgagttgccaaccctgttttacagggtttatggatttttctagtgatttcagtgaaaagtatttgattcaatctcatataagtgtttgaaaattcagggacaaatggctacaaaatgcacagttgtatacacagcagttgctgggggttccaagtgcgggagcattgttgccctgaatgatgatgcttatgtttgttatggtaaaaagggtcggaggttctgaggtcgtgacaggggttaaaggattagcatgtgacaataagtatcagtcaggaaaatggaaaagtagaactaatttttcttgcacccacctgtgctttctgtcaaataaaaacttgtggtaatgacacagtgaggagaagagacaaaggttaatgagtaacacaagttcaaatgtgtaatgtattggagcgtaaattggatcatacaatccagtgtggctgggagaactaacaaaagagattgagctcacagtggaaaattttgggaggcaggcaacttaatttctgttgtttgaacagcttaaaactattaatacatgccagttttatttagcataagttttgtttgcaagaagcacttttaaatgacaaaactacaactgttyagaggggccataagaattctaaacagtttttctataacttaatctttcacatccatgttacaaagaaagtaccagtgacgcttgctctcttgttcttaaaatacaatagatataaaaagtagtaactattatatgatgttataattatacaaaacttggtattaacactgttaaattgtgaaagcctttagtaaagtcatagtcacagtgctttatttgtatgattatataatactggctataacgagtatatatcttgataccctgcagagaatagtatagagtatctttatatctcttgataagagaaagcattacatctttagcattggaaagcttacagttatatgtggggaatataaagggatttccccaaattataatcttttaaaagtctattcttctggaattatgaaaatagtcccacttaaggaatttcagaattctgcatttttttattttaaattttattttctttttcaggcagaaatttaaatttggtttttgagaagcagaaaaaaaaattcaagtgaagctgaaaaaacattttgagaaacataaaaataaataaatgacccatgaaagtctaagaggcagaaagtgtctgtcagttctattaattcacagtggtggcccgacagaaacacattttgtgaatctagctcatagataaaaagaaaggtcagagttcacagagctagtttatcgcaaatggttctcatggatttttgttttccctcaggttttctgggttcattgtttaaatggcctcttccactcagttattctgttttggtttccactaaaagcccttcagtatggtaagtagaagggatatgaatgcaaagagatgactttttacttttttagaaaaataactcattgtcaatgtatgtttaaaagtatagcagtttcattgtatgatatttmtcttaacctaaaatgcatgcacccaaaaattgtacacactttgaagatttttattattcctttgggagcaaagtgatttaatatatgcaaagcctttcttctttacttctcatgttttccaaacttgcagagagttaaattttagggctttttttccctctgttgatgtatagtttgaggacaataagtgctaatattttatgtagcctatttattatacctatgaggcttgtatcaagccctttatactgaacttaatcagacatgctggtattttgaagtatacttgagccaatgttttggatgaggtttttaatatgtttttatgttcatcttggagtgttagcttttactctgctcattttgagggaagtkattttattctctcggtttggagaaagaggatcatggtgcatttcctatacacataaaagtcattaaatagctactttagaaaagagatccctgtgattcttaagctggtgctgctctgtcttggagccgactttgccttgagatcctcgggaagacaccaaccattcagcgtgcctgcttcaatactacggtaatcaaaaacacaacacatagtacacccaaggaattgtcagtcctttataagtacaggccatacctacgtctatcaattaatggttgccaacagaagagagtgctgcctgctgctgcccactgatgatctcctctccataggtagccagagtgatccctgcagaacatgaatcaggccaggtgcttccctcctcagaattccataaagatttagcatacttagaacaaaatcctccacctccaaattgttccccattcttcacagatattcgaattggctctctcccctccgatgcctcaggtctgtgctcaagaagccttccccgatcatcctgtccaaaagagcagccaccacctgcccccactgctcctaggctctattcccttgtcagcctgtatgtcttcatggtacttgtcaatcargttttgatatgtttgtttcttttgtatgatctttctcaaaactcttttaaaattgaagcttcagatgggcaggtaattagtagtttcgttgcattcacagtgcttagaacagtgcgtagcttgtagtaggcactcagcaaattgtgaatgaattaccaagagcttgtggcataagcgaggtgagtattacaaagaaggcagtggtttcatattctagctaagattttaatctccttttttaattgctcagtaaattacaacagtaaatacttttcaatgtctaggctgtggaatgagcatggtaagaatatttaattaaagtgtagaatattgaccctggaggccaggagaattacagtgagttagtttgttgcttgcttgtttggctttgacatataattcacataccataaaagttaactcttttaaagtgtacaattcagtagttttttagtatattcactgaattwtgcagatgtcaccactatctgatgcccgacattcatatcatccaatagagaagccccatatccattggcaatcactccctgtttctccacaccttccctaccagaccctggcaactacttacatttttwttatctctatggatttacctattctagacattttatataaatggaatcattatgtgaccgtggttcatccatgttgcaactggaatcaatacttcctttttatggctgaataatattccatggtatagatatgccacattttttaatctgttcatcagttgatggaccttcagattgtttccactttttggagcaacaggatatggaggtccagggtacaattcaagataccctgacctcagacaagctctccaagtaaaatttattttcaaaatgcaaaattgatataggtttgaaagataaggtatgcccgtcttctaaactgctatttcaaccttctaaattagaaaaaaagaaattgaatatcaaaagtcacttaaaccagatagcatccaaaacaccttagcaatgacagggtttgaaaggaattcccaagtgacttcatcttccagagaagcagttcctagatccatcattacgtctctctggaaagctgcgcagctctccagcttcagtcaaggcagttcacgggagtgctgcttatagagaccaaaactagccaagactagggaacatttgctttctttttttaaggggtgaattgacgtttagcataaactactttatggttttgatgttgagagatttgtagttgttgtttcgccttgttttcatttttaaataaggaatgttttagtggggagggttcttttgttttttgatttctgaaaggatggggatactgaagaactttacacatgctgtgtaatatatagctacatattcatctattcctttgcctcagcagttctgaaagagtagtctgtagaccctgggaatacccaagacccttttgccatccacaaacagtggtaccactgtgctagtagtcattatattcttcaccgtcatgcactaggtttcatttaagaatgtgcatgaagacaccataaaactaatgcttttattaaaacttgaaccatcttaataatattttgtatttgacaaaatgggaagtattaacatacatataaagcagttctgcataccaaagtgcagtgattgtctcaaggaatggtgccttctggattgaaccagagactgcagaatcatgcatgggtaaaagatccattcaaagtgcaaagtaggctgggcatggtggctcacacctgtaatcccagcactttgggagcccaatgcaggtggatcacatgaggtcaggagttcgagaccagcctggccaacatggcaaaactccgtctctactaagaatacaaaaattagccaggtgtggaggcgcatgcctgtggtcccagctactcaggaggctgaggcaggaaaatcgcttgaacctaggaggtggaggttgcagtgagccaagatcatgccactgcactccagcctgggcgacagaacaagactccatctcaaaaaaaaaaaaaaaaaaaaaaacgcamagtacaaagtagactgatggattttaatgcaataaagtacagaaagttcattgatatagtttcagattccacactggcaaccaacctttaagaaactacctctaccactttgagaaactacttgttggccaggcttagtagctcacacctgtaatcccagcacttcgggagcccaaggtgggtggaccacttgaggtcaggagttcgagaccagcctggccaacctggtgaaaccccgtctctaccaaaaatacaaaaattagctgggcatggtcacgtgtgcctgtaaccccaactactcaagaggctgaagcaggagaattgcttgaacccaggaggtggaggttgcggtgagctgaggtcacatcactgcactccagcctggacaacagagtgagactccatctcaaaaaaaaaaaaaaaaaaaaaaaaaaaagtaaagaaagagaaggagggagggaggctacttgttgagttttgatgtagtatcaaagactatccacaattattggaaaagattattaaaatagtcttcttctttgtaactccatatcactgtgcagctggatttccttttatatttcaaccaaaacgtgagaatccagctgctttctattaagccagaaataagagattgtgaaaacccaaacaataccatttttctcacttatttttttgtttgctttggaaaatacttttcagaaaacctgtcatttatattaccatgtgttaggttttatatttatgataatcaatacataattttaaattttctgttttaatttctaatttggtaaatattgatagacataaaccacataaaaactttttgagaccctcaataattttttagtgtaaagagatccatagaccaggaagtatgagaatgagtgatttacccaaattattcaaatgctgaacatgccttgccctgatactgcttggtgatttacatacagaacttcattgtcacttcaaaamcccctcaggttaaatagcttcactcsttttagctaaacagagttccatagggattgattataaataacccaaaatgacacaactgttaatagtaatagaactaaacttcrgtgtctccaaagctcaccagtaccactctctgtgtttcatcccatactttattctaatacagtttgcccttacatatttgactctgaataaacgttgaatatgtgcatgcatcactgtattatatatacygtggatttttaatttttcaatggtatcaatgatttaattattcagctcttgcttattttcacttgattttatcagtactagaaatttttgtgcatcagctaccacttccttcgtctaaagccacatttgaaggcggccaggtgcagtggctcactcttgtaatcccagcgctttgggaggccaaagccagcagatcacttgaggccaggagttcgagaccagcctggtcaacatggtgaaaccccgtctctactaaaaataacaaaattagctgggcatgggggcgcacacctataatcccagctactccggaggctgaggcacgataattactagaacccgggagcggaggttgcagtgagccgagatcacgccactgcactccaacctggatgacaaagtaagaccgtctaaaaaaaataaataaatagaaataaagccacgtttgttagtcattgctaaaataacaaaatactttaaaatatgcccctatactcagccagatcctcaaagaaccacatgcctgaaaccatactggtgttccttggccctctgtgagttgcttttatgaatcccttttggcccaatgccaacaactttattgagagatagcgagaagattccctatgactctcatccatattgttaacagagttctttattacgatccagaatgccctttcctgctttgtttgaacaatttgttggattttttttttttaatcttgtggactctgaaaattcgttaacaagtcagatttccttcttcaatgttgtcttttgtggcctatctttacagcagctttgttagcactcaagagtgtttggggttgttttttttttttaatctcatttctggctccattgtgtatcccttgatttcccttccttcgttcaaactttctgaatatctttgaaaagattctgaaagaatctcattttcctttctaataggcctctccttttcgtacaggtactgcatttggaaatgggaaaacctcggattatctgctactgggaaactttgtgtacactgtgagtgcrggatgtcggtctcgtttgcgtgtaaaatcaaaacctttcatctgtcctcattttatttttaaatttaaacgtgatatgagtgtttctggatttaagggttgtttacggttccctttaaaaattaagtaagacccagggcttataatggggtcttatttcatttttatcaaataatgaaataaaataactgaatgataggaaatcagtgccgttaagtagcagaaggaatgaggttttgccaaatctggggggtctcctttctcttggcatcaacccaccgaagtagtaaaagacaagcaaaagtatgtttgcaggggctggtggctccttctcatatgacatgaatgcgaaagcagagcagtgggtagaaatagatcagagcgtatgtcatggatgtctcctggggacactttacagtatccaggtctcaggagagtatttttctttaatttatttcaaactatatctcttctctttttttttttttttttttgagagggcgtttcactcttgtcgcccaggctggagtgcagtggcatgaccttggctcactgcagcctctgcctcatgggttcatgtgattctcctgcctcagcctcctgagtagctggaattacaggcgtgtgccatcacgcccagctaatttttgtatttttagtagagacaaggtttcaccatgttggccaggctggtctcaaacccctgacctcaggtgatccacccacctcagcctcccaaagtgctgggattaaaggcatgagccaccacacctggcctatatctcttcttttagaatgtttggatcacataaattaatttttgcatttagtaagttttattttaacaaataacctaaattgccattagctatcctgctgagaaagctcaactgttcttactgtaacctgactttacaaccccactgggaagtgtcttatcacatgctgtgtgcaaacccttaatgtgccttaaagtagaactgggcacttcaagcatttattgatcaagtgctagcaaacatcacttccatcaccacaactatcaaaggtgcctagggtttccttgacgactaacaatatttaagattgtattattataaataaataatattccatgttaatcactgttctgagtattttagagttttactctcaagaaaagaaaaaaaaaatctctgtaagattggtaagctttatcagtcccagtttacaagtataggagtcgagacacagagacgtgaagtaacttgctttgttcattaaccacaatagctaagtgataacgtcttgggcacaggtagtctgactccatggcaagtacacttcataattatgttacactgtggaaaacacagagcaattaatccaaccccagtttcctttttcagaatgactagcgtaagccccagcgatgggtgcatatatcatggagaaatgtctcatgtcctactcagcaaggttttaagtaaagttccagagtaagcatttagatttctaaatgtctggttattttattcattaaaatttgtctttaaaattcagaaagttggacttttaatatgaaaggagatttaaaataaaggtaaagtaagcttgaaaactcaaattaacccaggcatgtgctgttgctgttcatgaattgtacaaaaagcagaaaacacatacagaggaactcgtggatggagggtcaggctgtgcaggtgagggagaggcaaggaagccggaagtgcagtgctgccctgggcacctctgacctatcacagtcccrtcrgctgcccagctaatttacctgtctctttgctggttggatatacaaagcaagcagcagtctcctagtcccayagttacattcagagatctctgttctttataaatccttcagtcatttgatgaactttcatgtttatgaggtaaaataacattttccccttctgttttagtttgtggtgataactgtgtgtttgaaagctggattggagacatcatattggacatgggtaagaaaatatctaaccacaaccaagaaatgtcacatttacttgtgcattatctccagtcttggtggtggtcttcactctaacttgatatgtcccaggttaatatgtcctagtccacaggttttcaattgtggggtgtcaggggtaggggaaggagaactggaggttttagttgggaaatactgagttaaacaaacttaaacaagtgcattaccacaagacttctcagagcctttaaagtattgtcatatattatgagtatcccaggaagtggtgagactttaaacttacggattacaagtcttttcttagaggtgtcactggactggtgttctgcagcaaacccattggaaagtgattctgaagactgaaaatattaaagatttgtcctcagacattgacaaatacccagtcttgttccattttagatacgttagttttgcggtgtacccccgtccagtagagaccccggaaacaaaaagacattaaagtttcatgtcgctgggaaagattgcyacaaggcgtttggatttaacagccatcagcwtacatataatattctcacaagggtctgacatgtttcggtgagagcatgcagaccaagagtaaggcaggcttccaaatgttcaggggtaaaaaaggtaagcgtaagaggagaaaactaccaaaaaagctagaggaggaacagttcgaaattccagtaccacaaacattgcaactgttgtagaagagattagcacttaaagatccaattaaaaaacacacacaattaggtagaaactcctatagataatatttttatggatataataaaaagttaataagggaatttgagagagtttcattagtatttgtgtactyggtctacataaaacttttttgactcagatttccttgctctacagttcagccacatagcgatatgggggagcatcgcactctgggtggtgttttttggaatctactcatctctgtggcctgccattccgatggcccctgatatgtcaggagaggtaatgtgcgctaataactcacaatccaacaaaaccttaaaaactggtattttttagcaaaccttaatcgtttagcataattttccatcttgttgatttatattaaaataggatttgaccatttaaaagctgtttttaaattccacagtttcgactgattaatcttgagagaatattttaaacttgaacattttacttaaatctgacttaccttttcataaacataaccaagacaataaaatatggttgtcgggagcttgaatctcgttaagaatatccatatagaagatgccattttaaaattacaccataaagccacaaatacattttgattaaagatttggggaaatggtgagtttctgtctggggacagtctatcatttcttctgttatctcttattccagagaaaaatctgctgtcactagattaaatgcactttttgagttgtcctaatgacatcagtttggttttcattttgaaagaattagggcatctgacatttcagccttatcatagtccattttcaattctgtctttcagtttcttgttacacgggtaggaattgagttattaggtgttcatgggggagtgtcaaaagatctcctttccttctgaagagattccagcagtaggagggtttatgatttcaattgcaggaaatttgacataaaatgtataaaagtaaatgtggaaaacattttgggatttcctgtgacctcacagtaacttgcaaatcaaggtaatgtgagctccgtgacagtacattgttttaccgcagtcccaggaaccctttccagtggttttcatgtatttgttgcccctaagtactgcctgagtacctttcacttttgacagtctggtttatagatcattttcatgaaattttatctgacagcatcctgctttttataaattagcagaatgcagacacatttttaaaaatttgtggttaaatttattagagagaggcattatatactattacagcaaaaccagacatatcaaggagtatatacttccttctacaaaaagtgaaggcttcttttgaaacatatattgtgaaaactagaaattttaacagcatgtattctaagcagaacagggagaatgccgtgagtgggtctcctctttaccttggtttctgagtccttttcctgaaataaaggaatacaactgaaggaaaaaaagtatgtgcatgtgtatgtatctgattatgacatttggaaaatttaattctattctttgtttttatctgatgtgctctgtctcattggacctgcctttcccttaggtcgattttaacttgatatctttttcattagacataagtctttgccttcctttatctcatttcttaatgtttattttattttcaaaatgaataacacaaaagatttgagacccagatggtttaagcaagtgtggccaataggtttgatgacaagaactgaggttttgaccacctacttctaggacaagtgtgaagtttgactggctttttgcccaccaaatataattctacccttgcctgtagaattcccagtattacccaaacacaaaacttaatatcgtctcttgagactcatggtgatgctgtgtttaattcaaagtgaaatgaatgtcagtactccatcacatttctgttcacttcagatacagtgggaatgctaacagaggttcttttcttgttgttttattactactgctactctgaatatagtgtttaaatagctggtgctccactgaaaatatgaaaatggattaattcagctgtagggtaggcttgactagcacgtccaaaatgtctgtttattcaaacaaaagaagaatactttaagtttatgtagcactttagtgctcccaaagcattttggtgtgggtatggatgtgggtgtggtgggatgtgggtgtgtgtgcgtgtaaatgagcctcacaataatgccaatataaggatatagtgagaatgccactcagattctccgaggtaaatcatctccatttactgtttcttgggcattaggctaataagtcccaaaaaatgttgtagctgtattcaatttctaacatttttattatagatatagggtcactagttatgttacattacaactcagttaatttcaacaagaagtgactactcttaggtctatatttttctaatcttaaaattcttatctcaatcaagaatatagccaaatatatacatatatatacatacatatataaatgtgaaagattcatgtatgtgccaatatttatatctgtaggcatatacataattggccaactgtcttaaagcttattcaactgttaactttcatagcaatatattattgtaatatattgtacattacatatattatctattgcatatagtaatatattgtaagtaatgccagcataagttaaatgttagcatctgctgccttgacatgtttatgatatccacgtaatgaaacacggcccagagcagcccccagaacttgaggccgttctgcaggattcctgatgcagggtgtaggtaatttctgtcaccaccactaacagggtcataagtatctaatccaaagaccatatccccaggatcccagtcctttcctgtgttgatttggcagcaattccttccacactaaataattaactaattatgtacgtaagtgtgttttggttgcccaaaagcttaataagggtctccaggatggtaccttgtagaggtggagcagacagagaatagcagccctgttctgctctgtgctggttcaggaggtattttggagagtgagacactgtgtggttctaaagggacgttgactgaatagaggagctctataaaaaggcaaccaagatctgggaagaataacaccaataatacctcatgaatattgaacrcttactttatcccaggtagttctgtaaggactatatatatattttttttcaatcaatcaatccaacagctattgagattcttctgtgtgtctgacgctattctaggcactgtggattcagtcctgaatgaaacagacagaaacccatgccctcccatagctcacttttctagtgcaagggggcagaccataaatacaatgagtaatgaaatatggaaatgtttaagtgcctagagaaaagtacagcaggtaaggggaaccaagagccatattttcagttgtgtttcccataaagccttgtggcatttactcatagtcagattaaaaaaaaaaaaaaaaaaaaactggaggagcttgagagggaagtgtcatgacctgatttatattttcgctgtaggactctgactgttgtattgcaagccgcttaggaggctattccagtaaaacaggtgagagatcatggtgtgtggggcccggagggcagcagtggtaagaagtggttggattctgaatacagtttgagggcagagccaataggattgatggacaggttggatgtgaggagacagaggagaagtcagggcagactccgttgtgtttgccatgaacatcaggagagagtgcttgtcggtaactcacatgatcctcacaccaaatgggttgccatgatcaccactttacagatgtggaaaytgaggcacagagaagttaggaaccttatctgacatcactatctgactcatagtggcagagataaggtttcaacttcgatgtctgatccccaggtctgctaccttaaacgttgccctgtgctccttctctgataatagttgctaagaggaatgcatggtatttgatctggaaattagaagtctaaagggaccctcagtcctcgcaggtatttcagggatttgtaaaggaaaggaaatctctgtattctgttttactggcagcactacctcctccatgttcttctctctgccatttcctctctatagacattgcagcggtcttgttcttcctcagtccttcttccacatcagtgccacagtaaccatttcagaatgcttaaactgcttctcgagcgatgactgtatcttcatttctttcctcattcactcagacctaatggtgcggggcccctagtgccccataaatgagtgttaagtgattggcaaataacattttttgcttgcttccgtgttttagacaaacaaatgagaaacagtgaaatagaggttatagagaagcagctttcagctcacataagtacatctttccaacatcttgtgatttccaacacatgaagattttcagcagcagaacaggatgctggtctcatttaactaatccttcccaggccaggcagatgagctcccagccactgtgatacttaagcagcactacattctatgcctctgagcttgtcttccaattcctaagagtttctcttgtatgcctctctttactgcgtccacttcagagaactatcttaaaagggcacagatattttgctctagttaacaggatctcggggtgcaaattatacaaattcagcaacttacaggtacaggtctcatgcttctatattcagcttcatgcagattcacacattaatcaggactttatagtcatttccaacttacattcttgggtcatctttgcagcaaagacagagccatttctctcaatgtgttgaaagaaaatccttgctccctaagttggggagggaagggaaccaacatttattgtgtacctactgagttctccaggcgctatgtttaatgccagatactccttgttttcgctaaactcatgttccaaatctgtgtagtaagcaaagaaatagccagtgacccagagaatttaacccaggtcattcttttcaatcccattggtttctgctagcatcctgaggaattcagtaccttctttttggggcccattgctgttccgtactctcaggtgwtaactctttttgtcttgtagccatcctccttgcattcagtccatctgccatttccccgcttttcccagggccctgaacaatttctataagctagccagatatgaaagtgctcccatctctttaaaaaagtgcccagagttataattcccccttctcaacacccacctgactccctcaaccctatttagagaaattccatctcacttcatatcctagcctcttgcctcttcttaacagcaatattagcataaataatacccattttgttaaaaaaaatttaaaaaaactattaaatagaaaacccagtcatcctacatcatcagaaaacgaatggttgccactcagctataatagggccccattgatgaagggccagtcactgttagaggcacttttcatgtagtcactcatttaatgttcacagccacactgtaaggtaaatccttttagacatttcacagacacaaagtgaagacacactttctgaaggtcaaacagctccagagtatctgaactacagtgtgaacccagcctgattctgtcccctgatgcaccgtgcacactcctgtctgttccttttccatttcttctctcatcttttctttccccttccctgtggcttttctcccagacttatcaactttaatttaatgcccttctagcatcagtgccacccatcgaagtacttagttccatctggttgatgaactgaccagtcatgatgtgcatatactatttccatcttcagctgtccttagctgcctttgtctctgcccagaagttcttttcagrgcatcagatagcttttccccttttgcttccgctcattctgcatgcctgaagtgaccagaaagctattcctcaaatatctcagagtttagtgcagacttggttactgtagacccagccgagagttggttgttctcagttggtgggcagggtgttctcatttggaaaacattcccacctatagttttgcactttgtttccactacagtaattcgacatctctacccatgataatgattcaaatgataatgattaacaagtgtcccacaaccataaattattgaaatatttaactgttcaaaaggaattacgatatcgggggttaggggcagtgggggtaaggtagacaattggaaaatgcaacaataagaaatcatttaggaaaggaaaaagaaactagtgtgacgaacttggctgtcgctttaaataagttgctgtcttcctctcctctcacaaatatggttgtgatttaagaggagaactttttttcagacctgacttgtattttttcacaccagtacaacaatttatggggcaaggtaggccctggggaaaagtgctatgttatataaacatatgttggcctgcttttccgactcgtctaaatgatgttactgagtattttttgaatttctaggagaaaatagtttagccaatgattaataaaccagattaaaaaataaaaaaccagctacagcagggatcgtttcatatcaggattaataacagaagcttagtatcagcaaaacctttaaatttattgtggcattgcagacaggcactgtaaagtcctcccgagcaccatctgtttctgctctccctggcctaagggatctataaaactactgaaggaaattgaagttaaggaacgagcatgtgttttacagaatttcagatctcttgattgaggtttgtaaaggctttctgaaaaacaataaaaatctttgttgaaccctttggtgtcagccctgtaggaaaggtattaataaactacattagtgatatgattttcctaaattgtgctgttgcctattttatccaacataataaattacttttcatatgaggaatttcctggttaaaagagtctttattgatctatcagcttttaattacctccgtagcatgtggtaatttattggtcttaagaccaacccttgttgctgaggtggggcagtgttatgatatgatggagtttcatctgagattactgtgtttagccaagtagcctggagggaacaactatgcaaaattctgtcagatgttcttcaatgagccaatgactgtgagtccatccagtaaaacctgccattggtcacagtcctcatgcccccaacagtaaatgaaacaggtagaccttcattcactgttctaaaggcagctggccaagagccacttccaagcccattttgtaaagagaagtatatatggaaatgctgagaggaaaagggagacatgggtatgacaaacgtaatcgtgaatcaggacctctgaacatctgcatacactttacagtgagagctctccttagagccattacgagaaccagcattgtgttttgtaaccacagcacctttgcctgcaatatacggcaagtgtagatcgagcgtctaatgtgtgccagggcctgtgttaggcactggaggatgcaaggatgaatggaattggccttgtcctcaaggatccctttgtttaatggtggggcattgatgtcataaacgagagagaggccatggtgtacccgtatgctacagtgatgagcaacgtatgaaagctgaacgaagcctgctcctggtacggcacagctttaactattcagccctagagtcaattcattgtcgcattcattcattccataaatatgtgttgaggacttaattggtgccaggcactgttcctcaataccaagttaattgggcaggatccccattgcctaattgagggggccagggaatgggaaggagaaacaggtactaaaccagttaacaaatgactaaatgaagaataagtaaagataatttgacaaagtgataagtgacgggaggaacacagaacagatatgataggggacaggattataatgggtgttccaggaaggtctttctgaagttgggacggttaagctgaaactcacatgatgcaggaatgaatacctgtcatatgaagaagagcatttcacgctcaaggagtagcaggtgcccattctccaaggtggcaacgggattttccatccaaacacaaggcccgtgactgcagcagagagagctggagagagcactgtgaggtggggtcagtgaggtgggcagagggcggactgcctctctgccctccaggcccagcattctagtgtgggaaccaccacagtttttgtttgaatgacaggccagaaatactcatgaaagaaagtatgaaagtcgttgtgccatctgtttcaataaagctcataactggagatagtttgttttttttkttttgtttttttttktktttttttttttgagatgaagtctcgctcttgtcccccaggctggagtacaatggcgtgatctcagctcactgcaacctccacttcctgggttcaagctattgtcctgcctcagcctcctgaktagctgggattacaggtgcccgccaccacgcccagccaatttttgtatttttagtagagatgggtttttgccgtgttggccaggctggtctcgaactcctgacctcaggtgatccacccatcttggcctcccaaagtgctgggattacaggcgtgagccaccacgcccagccaactggacataattcttgcattccatcatatggtaaggtaaagggctcgtcaatgactggtgttaagctgctttgttcaaagttgtcacttaagctccctagcatgcatcatccaaagcaagttactttatggcatatttttcagcatttaaaaaagtaactggattaaacaagataaaaacgtatttatcttccatgtaatagaagtcaattgggagacaggcagtccaggactggtatggaatctgcacagtcgtcagagactaggttgcctttaacttactgtactgccaaccttagtgtacttcctcagtctagaatggctgtctgagctctagccattttaccaaccttccagctagcaagagagggaagaaggagtaaccctttctatttgaggctccttcttagacattaccaatacgtttctacttagatctcattgaccaaaagctaatcatatagccaaagtagctgcaacaagagagccagagggatgtagcctttgagctggaggaaaaggtgtccagccaaggaccaaagtgattgcatctaaagaagatagagaaaggagatagatttgatagaatgaagggcaactaaaagtctcagccatgtaagtcagtttttctatgtaagccatataacagctgtttttctttagctaagtgctttttgaagttttgaggtatttaaaaatcattttctacagtcttgaaatgcaggttattgtgttttacagactgatttgtaatcaaacaactgatgctttatgagatggctttttaaagatttttttaaaaaggtaaaatgcagaaccatcacaaaattataaaaatctgtaagaatggtgtaacaagtaaatatattgaacactgagatatcataccctgtctcatacaacttacttaataacatcatagtattttaaaattttgtttctcytaatgaaaaaaattttttttactaatactgtcctcatttttctgygacttttaagtttttaaataggacaataatgaagattaaaataaaacgaattatgtttttaattatcttcactattctgggaactatattcctagagaatagtttcagaactgcacattttctagtgctcttgatgcctttttagaaagactattttcttttgcatgtttagttctcagtatgcattgatatatagtcaaaaaattttttataaaaattaacttctagtttatccaggtcccaactagctcttcctcctttccytctaaacaccttttttaatcgttttttttttttttattactctcttgccagagaacagagatgcaaagtttctttcttgtatcatatggctagattgagtattggttcttagcccccacgagatgataacccctttttcagctcctcatcaccccagagaaatgtccaaaggaaagaagcacataaatgctgtgagctggtatctaatttgcatattttctaagatttgkgtttgtttgtttgtttgtttgtttgtttgggataacccaagccaagagttttctttgtctctgagtaatcaaaagctgctgagaataattgtaaacatattggggtttatctgaaacaccctttagttattttctgggtgttctgccctgtctagtttcgtggagaaagtaaccatcccatgtaagagcccaattcagttcaattaaactgagatttatggagtgcctatgtstcaggrcctataccgggttcagtggatcaaaagtttcaaaaagagtccattctgaagagctagtttgtcatggagtagtcccacagacaattaggatgtaagacgctagctgttatgctcataatgcacagggactaacagagaagagagcgctggacgcccaagctgttgtttggaaaagtgtcttggtactactgttccccaagctgtccaggaaggtgggtgtgaaaagagttttccaggtacagaacagcccaagcaaggagcaagtgtggtgttaccaaggcagaaaatgattggagctagaaccagaaagttgagcaaagaccaggtcacaaaaagttacctgaatgtcattaacatcattactgtaagtcatggcagacatcttttcrttacagaatatacagtattccagagagtaccagaagccatagaataaagatttgagtcagaggaagtgataaatgctattgataaactaggaagtcatgaagataattayattttgatgtgaatatatataccatataattgaaatttgcaagaatttttttcagctaaaatgaaagacagtaaagttagttcttaatgataaggcccagaacagagaatttggcatttgcactcctttgtctgtaggctttctcagagggaagtgttgagccagactacccaagatgtgcagctactgaaggatkcagtgggacttctcttcatgccaaggttcatatgaacttagaatttgtctctggttaaagtacaaggtggcaaattcaccacttactgctcatccagggatgcttgcgtaccacccagttcaaccccatgcccaactaccataatgaattcagactggaaggctcgggcctctgagaaagagtccaacaactttatgacctctgcagtgtcccaccatggtatttcaccagcctggaacacaaagacactttcagaagtgtttgcaagttcagattctaatgacacttttcagtgtctgaaagcagagttgattttgatagtcgatgtgaagttcccatacatcagtggtagcattgccagcagagaggactctagcattctactgatatatttctaccttgccataaaaatatagrtattaatattgtggattttagcttttaagatactctagagtatctttgctgtaaaaatatagatgttaaagttgtggatttctccagttttcggggtactctagagtaaccctggagtctcaggtttcatgaataagatcttccagtccactgagattgggtgactgagaaaaggaastggaggagaaaagagcctattatgggtaactgagattgggtgagatgagactgaaatgggaatacagcaacacaaaatgcaccttctccgaagagatacctcgctaatagagcatagacaaagcactgcggtatagcaaggaggaaagagccacaatgcggttggaaagatcaagaaaacttgcatgaaaagaaacaatacctgcaaacttgaagctaagcattgaagatttttattgatgatgatttcacgaagaagatgcttcctgagaagaccaaaagagttaactgagacctaggaggagacaagagaaaykaaatgacctcagaccatggcagataggttttaaaaagagaaatgtgagaggtgtatatgtttcgggggatcatggtacaaatcatctctgaagagttatrctaccaggatgtttcagaggggtcagagccagaaagaaccattgacttcttggatttggcaaaatcctaggaaatacataatggatttgccacttttggagttttctctaacttgttaactcccttggaaagggcctaaatctttaaagataaaatagcctttttacacaaagaaaaatgaaagattccattcacagcaacaagaagaaaccttagccagttatgtgaatggttagtaggagaaaaactagaaaatttgacaaaaatgagagaaatattttaaaagttgaataaataaacataccattctctgaatagaaggatcattaaattgtaagttcttcccaatttgtgagccatttgggggaacaaaaaaaaatacaccttctcctcttgattgtaatctagtctaggaaaataattataaatgcagagaaagagattagagtctgactgaaaatagaggcattattatactattttgagtgcttctcatatcagtraaaattaaagttttttcctctttaaattttataataaaaatttttcaataacttagtaacttagtcgttaaatcaataatatatttcaacaaatatatgtcaaagcgctattctagtttctgggaatacaaccatgaaagaaaatctctgcctttgggaggttataatctagagaagaaaaacatacaaacataagtctattatacagcaggctggactgtgttaaatgctctggaggacttgagtgcaggggagaggatggggtggggtggggtgctgttttcaatggggtggtcacacaaggcctcactgtacctgaagtgttgtgaccaggacctgtggctatctggaagaaaattccagatggaaatagacaaatgctgagagcctgaagactgcagggtggtggaagctgaatgagggagggggtgactagtaaaagcactattattcctaacaaactaatgcaggaacagaaaactaaataccacatgttctcacttataagcgggagctaaatgatgacaacacatggacacrtagaggggagcarcacacactggggcccaccggagggtggaaggtgggagaagagagaggatcagggaaaatatctaagctcaatacctgggtgaggaaataatctgcatgtcaaacccccatgacacaagtttacctatgtaacaaacctgcacgtgtactcctaaacttaaaagttggagaaaaaaaaaaaaggcactagcgagctggccttcggagacagggctggggcagaacacccagggccatgagacaattgtaaagactctcgatttttctccaagtctctggagggttgagccaaggagtcacgatctgacttctaaaaggactgctctgggggctctgttaagaatagtatgtacagggaacaggcaggaggccaggggacccctagcaggctgttgtagcactccagacagaagatgatgggggcctaggcaaacgtggaagggcgtgaagtgggtagattctggatttggggtggggagaggatttgctctaagaatcttttttttttctttttcatttaaatgtttttgttatggtagaatatacataatgtatttatcattttaagtgtaaattcaatggcattaagcgtattcacattattgtgcaaccatcaccactgtccatctctagaactttttcatctttccctactgaaacctcatacctgttaaacaatccccattctccttttcccctaacccctagcagtcaccattgggcttgctgtttctgaatttgactattccaggcactgcatctaagtagaatcacacatttgtccttttatgtctggtttgttttatttggcaaaatgtattcagggttcatccatgttgtaacgtgggccagaatttcatgtctttgaaagctgaatgatattccattgtatggatatgccacattttccttgtccactcatctgttgatgttgtttccaccctttggctatagtgaacagtactgctgtgaacattggtgtatggatttttttaagtcaagccaataagatttgccagtaaattgaatgcacagtttcaaagaaaaggggaaacaaagatgacttgaggattttggccagggcagccagaaggataaagtttgtatttgcctagaggaggaagactggaattttatattctgcttctttttctttaacttagcaaagtgttcatactgtgtagttaattaaaatctttgttaatgctggtacttccttctcttcctgcctattctacagctcttcctcacctccccacaaccacaaaaaaaaaaacaaaacacttttatttccaggtatcatacctttcttggattcattgaaatacttctgatgattcagactgggagctggggatagtttaacatatttagcttttaatgcacactcgtcaaccttcaacagaaaaggcagcctacattggaaaaggatagtcatggagctgaatcaactcctctccccaaaatacgtaattatctggcaataactctccctagaataactccatgtcagagcacaagaaaaccaagcaaaccataaccaccacatctcaagaacagggtccccaggctctgtttttcatagtttctacaacactaggttgtgagaacatatttatccagcaattatttattgaacatctgcttggtggttaagcacttggatcatgagaattaagagagtatatagtctaacaagaggatgaatgagcaactagaaaatgggtgataggtgccaacataacggaagcccaagtagtgtcctctgagtctaagaaaggaaaattgaaggacgagtaggcatcacaggtgcaaaggcctgaggacaagagtgagcatgggcgctttccaggcatcaaaacatgttatgtgtagcaagagatgggcctggcttgagagatgatactgggaaagcaatcagaagtcagataggaaaggtcttgaaattgtattaaagattttgtattctattctgaggacattctgaagccacagaaagggtttaatccaggaactgctaacatcgaatttgccttttggaaatatctctcaggctgcagtgtgaacagctagaagcagagtatttctgaagtcagtacagctaggaggacaggcaaattatttggactgggataagcaaagttggccagagatggataaatgtgaagatgctaaagcacaacagaacctggtgaaatattggacacagggtaaaaagccaattcaggaatagggcccaggtttctgtcttgggcagccagggatgatgccattccctgaatagcttgtaccaaggaagagcagcctttggagggaagacagtgtgtgttcagtgtgggatgtgtgaggtttgaggtgcctgtgcgacccacaagttaggagctcagtagtctagcctgtgcttcaagttcaggtgagaaatctaagccacaggtgattagtggctgatttccatatgaatgatgatacaaactgcaaacccttccagggagggtgtttgtatgctaacagaaggctcctgggagaataccagggtagtttacgtttccctccaggactcttctaaactatcagtcttctgataattacaatctgtgaacagcatcttcacagcttggataacattctgaccgagggatgcacatttgcctaatgagccacatagtgccctgttagctttaactagtattttgttatttataacaacccacaacgaatatttgcattccccaaaattagttgtgtgggatgtttgtaagaaggatgtaggggaaagtgttccataatcaatcaatacctttaggaaacctgggtttaaaaaactattcagtagggtgctttactctgacttcttgaagccttacgctgctctgcgctgtgactctccaagaggatgctgccatggtttcttttcacctttactaaatctctggccatgggcccttttcaggggatgctttcaggactagcaaccacaggacagtttcatgagatactgataagcaaaagctggacttcattttaacacatagttcagaaattgaattatcgaattaaaaggaataaatgtttgtggtgttggtgcacattgccaaataccttttccaaaggctagttcattgctggtgggaatataaattgctacaaatacctattccaccatacacctctcactccaccaaactgatggtgaatttttaaaatctgatctaatttgtcagtgttctctaagactgcagagtgacttaacacttttccatgttgttaattacttgctgctgcttttatgaatacctttccaggtctcttgcctatctcttgagattgcagctattcttatgaagataaatgggctatttttctggtcagatattaacccagaatttcatgtatttgtagtagtcattctcccagttttttattgtttacttttttagttatgtttctttgaacacgtggaagttctacgttttcgtaaatcagttctttaaagcatcctttcatagttttttttcactgtttttaagctttgraagccttytatataaagctttgtccagacacttaataaataatcacttcttggttttttgttgttgttcccagcgttaacgcaactactctggaagttattcatttctcttactgcactcccctccaaaaaaatgttttgaagcactattttccaaataattttcccttccaaaattaatatattatgccggtgtagtcaataatttctatgacaaaattatttttctccattttctaaattggcaaattgagatgaatggcactttattagggatctcttactttggcctatgtttcatcattgcgttttaaaaatagcagataagacaagcgtgtgctgtgatattattgagatgaacatcataaaatttataaattgatttacagttaatttgatattgtcataaaaatttgcttccatgaagctcatgggacagatcactggaaagaaccagagacaagagcatttaaagaaatttgacaattgaaatgaagaaagtttgttaataatcaatgttatgcagccactttacaaacattattgagtttaattcctacaatccactgtacagctgaggaaactgagactgagaagtttcttcccgagtgtctgattagctgggaagggccgtgccaggaccacttccaggcctatcaccagacctgctccaactggggtccatggagacagtcttagagttctgcaaagggccttctgttttagatgtctatacatttccatgagtaagagtcacagcatgccactctgatattaatagtgtaaacacatagaggtagactgaagaaccatgccgttagtttgtaggcaggtggcacacttgaattctctctcctatgagactgaacatgggcacattgaaggtgaagaagggtttctgtctggcgtgggaacgtaggtgctaacagatcatgccgttgtgggtcagaaggtaaacccctcttatcggtcatgccccctgacttggccaaatgcacataaactcgtattttctcaaaggtttgttccctgaaagttcacatagaaatttcagaacaattcctcttctgcaagttgtgttttcaggcagcgttggtttatttttgaagccccagtggttcgattttgagccggcatcactctgcagagacaagcagttgcttgttcgccacacacggcctgtgccctcctgttaccagctttgcagcttcctcagctgatcccttctcaaggcccccgggagccactttcgtggcaaattccatttggtttcacagtgccttgagaaggggcagtgggggccacttggcctggtgcaccagtctcccacattaggagaaatttgcaaaccgctctcggagggaaccggagctcggcccgaacaggctgctcctgttcggagcaatccaccattgtctcaggatcccttcgccttttcccagctgacctgcctgtgagtggggaaatgtgaaaagttagagacaaaactggtttcttcagagtgagggggagctttcttatacagaaaggaaggaaatacctctgtgggattttattttyccccccctcttcatccaaaaaatacaaagagactctctgtctttaatgcgaatgtcggctttaaatcttttaggtttggattaactctgcaaaagaaaaaaaaactgacaggctttcagatatgacgcagaaaaacttttttcccctcaattcatgttgttcatttgtaatgccaaaggctggtagactgaatggtggggcgccagtcactcctccattcatcgttagcatcacaatggtcagaattagcagccttgaatctccaccacttttgccttttccactggtggacatttaatacaaggtggtgaaggcaagaataaatcctccttctcttgcccccccccaaccaaattaaaatatattaaaattaagccaagtaaatgtattttcagttgcatgccttggaattcttaccttacctttccccccagaaggagaaagaaattggttttttacagttgttaccttactagaaagcttctttcaatctaaagaaaatctactgacttgatagacatttcctattacacagttattgttggttttcaccattgaggatgtcagcaaacatgtcaaagatcatgttttgcttattaaataaagtgacttttatgtgagtatttttcatcttgttggtgtctcgaatattggtgctatttcattgaacccatgtggcaaaacttattttctggaattttttgtaatagcatgtttttattttaaaagtattcagagctattcacttctacatagcgaaaaatcttagcgtccctgaacctgcggtctgtatcgataagctcatgtcaatgcagaaaaaatttaaacagcagttcctagtccttaatcgagagtccaaatgaataagtaatctgaaatataatttaaaattagaaatgtttatgtttgataaggactgattgattaggactatttatgtgtaattttgaaattgcctagaataattaaactctaggttatttttaattcctgaaccatacctgattctttttaattttgcatgatttttagtagaatctaaatgtgcatgcgttagttggctactttttaatggaattagaacaatacatatatggatttaaataggtactaaaaatttcctcttgataaaaagattaaaagaagtgaaaccaaaatatttcttttgcttttattgtataatactattccttttaagttctgtgtaatctaattatattacaaagatattttttattataattgcaaataaataatagaatttattactttttaaattacagaatcatttttttttgcaacccaaaaggctctaatacagcaatttggtatttattacaaagaaattattaaagttatttttaatacacttttatttggcttttacatacaagatatttggtttgacttyagcaataacaggtatgcaccaataccagttatataaatcattgaacaaaaattaagattattactacctaatgttagccaaaaataatcaaattgttgtttttgtaggtatcttaatttgattatacagtagtcatgatttatctggataatttttaatatcctataattttacaaaagtaattttcatttgccagaaatagtaaatttagtttctaattatgatttattttacacyatatcttataagagaatttaatccagagtatattttaaatttgctcaaagatttattttgatattctaagttaatttcataagttcgrattcagagttgtatactctcttacagaatgatattcttaaaattgtttcacttaaaaatacataaaaactaaacacaaatcatgtattttttggttttaaagtaatgttttttctgacgatttacacaggcagccatgttgttcagttctggagtcttttggatgggcttgttattcatccctgtggcatctctgctccttgatgtggtgtacaaggtgtaagtatatactcagttatatacggagaaatatagatgcatattcatcctcagatttctctcttggtaacatcaactcaagcatgtagagcttgcaggatagggactggtaatattacttaattttaaataaggaaggggtgattcaggaactagaaaactagtttaaaagacgaaatgagtagtaaagcgggtagtttcagttaacagagaaaagtaaatggcactggagaaaattacatcggggagtatgttttttagaaacagccccaaaactcatataaaagtaaaagaaaaattgtactatttccaaaaacattttttattataaaaagaaatgttttgcttgcctgattccaaacatatataaaatataaaatgaaagaaaagaaaaccttactaatttttttcaagggttataaattttaaaatcttatgtcttcccacaaaaaagatagcatttaatttaattacatgatatttatttaaataactatgggagtttcaatattgtaaacctaaaccatcatttatttttaaaactataatttctatattctcaaaattacggtaatttttaagattcttttgaaaaactgcttgtactcttgttaccattgtgctttatcaaccgcgtgataataagccagacatctagttttgtaaaatcttcacagaagtatttccatgcaaatccctttttttttctttttgcagtatcaagaggactgcttttaaaacattggtcgatgaagttcaggagctggaggcaaaatctcaagacccaggagcagttgtacttggaaaaaggtaaaatacacagtgaatatattcttttccaaatgaactttaaatttatcttgtactagtggttggaaataagtgataagacttgtatttgtcagcatcaagctggcagtgtcattggcaggtttgggagtcagagacatgtggatttaaatctgtcgctttctaaactgtgcccttggctacgttgcttaatcctactgagcctcaatttcctcatcaataaaatgggggcaataatacctacctcatggttagttgtaagagttgaatgaagtattataaagaacttagcatagtgcaaagtctttaatgagcattaaataaatggcagttacaaacattattgtattattaaactgcaagagaagaaaaagacttttagcttgaaatagtatccataataaaatgtatgtaatyggccaggcgtggtggctcacacttgtaatcccagcactttaggaggccgaggcgggcagataacaaggtcaggagttcgagaccagcctgaccaacattgtgaaattccatctctactaagaatacaaaaactagccaggcatggtgacgggcrcttgtaatcccagctactcaggaggctgaggcaagagaatagcttgaacctgggaggcagaggttgtagtgagccgaaatcaagccactgcactccagcctgggcaacagagcgcgagactccatctcagaaaaaaaaatagtatgtaatcaaaatcatagtttgatataaggcaaattaccttgtataattgcatttgtggttcagtagttattaggaactgacctagatatgtatcatatatgaagtgaattacctatcccaagttctcttccttacaccaccccctccaaaaaaaaaaggaaagttagaaagctaatcaaatccactaaattcacaaagcattgtaagaaagaaattataattagttgcagtctataataaaagacaattattaagataggaggaggaatttattttttttcttcatttttatcatactaaagctgaggttttggctaaactataggaaatattttaccctagtatatgtcaccttaatcatgattcactgttgttatccattttgacacaatggagtagttgtcagaactcagtgagaccttggcttccagctctcttgctctcattatgctgaaggaacacatcacacaccagtgtgtgccacttttttgaaartaatagcactgacctttgttgagcgctcacttcgtgccaggtgcttcccttgcattttacgtgtactatctcactgaatcccagtaacaaccctatacagatccatcatctccatttttttccagatgaggaaactggggcttcgagagatgaagttcccaaagttgttagtgacagatctgggcctggagtccatgccagctgatcccagagctcctgctctgaaccattcacaattctgcctccttttgctgtttgttcaaaaatataatagagctgcaaaaaacagcctactactaacttgacaaagtacttaatctctgactcagcatcccagtgtacaggatrggaatgataatacctactttcagggttgtgtcctcctccctccacctttttcttcatctaaaaatttgyatcacaggattcctcataggaaagtacctgcagtttgtcagtaaattcagctagtaaattaattatgtcagttctctttctctagcgataaaaagaatacagtaagagttctggccaggcgcggtggctcacacctgtaatcccagcactttgggaggccgaggcgggcagatcacgaggtcaggagatcgagaccatcctggctaacacrgtgaaaacccgtctctactaacaatacaaaaaattagccaggcgtggtggcgggcgcctgtagtcccagctactcgggaggctgaggcaggagaatggcgtgaatcctggaggcagagcttgcagtgagcagagatcatgccactgcactccagcctgggtgacagagcgagactctgtctcaaaaaaaaaaaaaaaagagttctagctcatgaaattgtgaataaaacaatgtattcgtaattattagggaaaggccactgttaatactgttactatccttagtagtaaatttccagatttgtaagtatgttaataaaatcacattaagcccttccacgtgatayttagtttgtctttttgttgtctaccaatgacttcaattcataaatcaggccagtgtaatgacccccaggtcctaaacattcagtgaktcygtaatatatgtagctccttctgttaaataaaataagccagagagcccaaaaaggaaagaagtgaattccagcataaatgaccaccaacttctccataggaaatgcatcagataaattccctgctgctgcctcgctcatttgcctaaaatagctatttagtttttcctaagaactcaggaatgtgttagctatcagctgaataccagacaaaaaaccctggaccagcatgtgctccatgttgccactgccgcccactggtgatcagaaggttaatgatcagtgtaaccatagtggcttcgtgcttgatggcaggtgcccggaggagggaggcaaggggaagatctgtgaaaggagaaaaatagcaactggatggaaacatcttcatgcttaaagtaatggcactctaaggttaaagaattgttggattgattttaccccctggattattttaggaatcttggagaatgacattgatttcagatttcaaaaaaagttagcagtttttttttgtttgtttgtttgtttttttttgagacggagtcttgcactgtcacccgggctggagtgcaatggcacaatctcggctcactgcaacctctgcctcccagattcacaccattctcctgcctcagcctccctagtagctgggattacaggcacacgccatcacacccggctaattttttgtaattttagtagagacggggtttcactatgttggccagactggtctcgaactcctgacctcgtgatccacccgcctcagcctcccaaagtgctgggattacaggcgtgggccactgcacccagccaaaacttagcaaattttatatctactttatcaaaagggaagaaattgtgattcttgtgaattctaatgataccagactttctttggttccaaaacaccatgttattttatatcttccagtctttgcatttgctgttcccctgtttgggagccccttcttacagactaggcactccaattcccagctttccaaacccratgtagattcaattttttcagctgtttgcattcacaatatttaattcctagcctactatctctgtactattatactctgtttatactctgtataaacttctataggtacactgatcgcattgcattataaagtattagtttactctatgtatgtttttattttccccctactagattgagcttctagagaggcccatgtcttagtcatagctgcaatgcaacacctggtacagcaccaggaacttagtagcactcagtaaatacttgttgagtggatgaacggaatagttaagagaataaactaaagaatggatgaaagaaagagtgggcgaaaggattgctgagtaggagaaaggattgttgaattgatggttgacctgtgggctgtgaaacagaaatctgattcataaaaacatagaattgtataatttgtacttcccaaactaggtaatatccaaagcaaccatcatttacttttttgtcatacaatgatgcagttcttaagaaagatcttgtgagttgatcatccccaatttttttaatcttcagtaagtatgactattaaactcaagttgtgtataaaatgcaaatgtcagaaaaacaaattgtaagcacttaaggaagattaatatttacaataatttctcatctttgttcattttcagaaaaaatcatcttggttaaaacagccatttttagtggaaatagtatgccacctaccatattaccctgcaaattagattcattttattacattttaggggaaaaatatgtttaatcaatctaagtatgttctaaatacgcatgcttttgagccatgggttatggtagaaataaatgcaagtctacaatgatgagagaataacctaaaccttactcctgaaggtttaaaataacccaaaccttgctgcctcatgacttctaccaaagtccatgtgaggagctgagttcttaagaactgaggaaaaaccgtccactggagaaaaataaaacggaaattgtactttaaaaaaagtaaaataacccaaatcttagtcctgaacatttaaaccttatccaaaagtttacagtaagaaatgatggacactgtgggctcattggaggcaggacaattatttttggatatcattggagtatgtgtgaagcagtgcatttcatvggcaaatacaataatgagactcataattcttttttatttctcactgtagatattagccagcatatcatcattggccattactaaatagaattttagcctaggatcttcaggtcagtcctcactgatttgcctggcactaccgtttggccattgtttacagcttttgcatgcagggagagtagggaatatgaggtgtcagagaactcggtggtgtagatggtgacagtgctctctctaacctttctgatgtattgttcatcttaatgaaaagcagttttaaccttgctccagaactagtagaaaggaaattttatttctcagtgttcacactcgattttatatcagtatgacttaaatactttggtggggattgaggacacagggatctgtcaaatgtttccttcagccttctctcatcactgtggtaatggttctgtccaacattcagaaagaaaagtgacagaacactgaaatgttttcagctccagggcagagataggcctgttatattcattgtttgtttctccgccaccacagctaccctagtgtaggacagctattgcatgctatacattaaacattccatgaatggatagttacgtactttttggagatttattttaatgagtcaacctaaatagcttatcaacycaatatgtagacaaatgcaaatttattcctcttcaagtttcccactgaaaattccttaagacaacacgttccaacacattccagaaccatgaattggtttttaccaacactgacattttttagtatttgaaatattattttaaacatgttatctttatattcacctccaccaaatgtttaaattgcaacattttagtgggtttggaaataaggtaacaatrtttagtagtagttgtgtgattgcattaaacaaactcaaaatttacatagcttggtatgtaaatgaaagactataagagactacgtaaaactgctagtcaagagttgtgaataaaatgtggttttagtgagaaggtatctttagtgtttttttttttgtcttttcacactgttaagctgttccactaaaactgaacttttaatatatctattagtgttagcataaatatattttataatgtgccttaatagtagtatcagtatctataaacattgatggcccagaattgcatagatgttgaaatgagtagttccccaaaggtgtaagataagactagagaaatacaactcatcatcacttatttatttagcaacctcctgtgaatggcatttatattctgaaggagggactctgctctacaggactaaagcaagaagttcaaaatagctaaggaaaaacaaaacaacaaaaatctagtcattttcttagtaaagaggtagaatgagaacattataaactaaaacccaygtgcagcaacacacrtctcaccttgcgcttatgttgactagaaaccaaggcatcaaaaatactccttacaaagtaccttttgtttggtgatgatctctgttctagttgattttttataataaattctcagcatcttgggggtaaaggtgggagggcccagcatttgttgagtgcttcctaagtgtcagtcattgtgctgacagctccctgcatcctcacagtctgcctgagagttaagtactgccctcctgatatataggagatgacagagaaaagcttgcctgtggtgacccagctaataagcagccaacgcaaaattaaaccaaagccctactccagagcccatgatctttcctgagtaatgtgcttctttcttaagaaagagactttcttactgctttgttttaatgctgtacgttaacttgatataaaagaagagctaatgagagcctttatatgaactgtacaaaacggaattatgttaccttatgtatttcagttgctgtaatatgaaagactaaattctcatgtctgccttcttaccactttaatattgtaatattaaagtattatgcatttaggaaggccagcctgaaacctggaaaatgtcttttgggaagaagatgctgcataatgatacattgccatcctctagtctcccgtagtcatttcggtttgaaacaccaaagactttccagcaccccatccacaaggctctgctaaggaagtcagaccacctgctgctaaagctgcgacttcctcaaagcagttacatattttagtgtccctcagggtccatgggtctgtaatgctagatcatttaaagagtagagtaagaaagcaactctgtaaaaatggccctttctcatttctcatatctgtttatttcactgacagaaacaagttttacaactatttgcagaactgctggagttttagattaattagttttcttgccttcatgtagctaatttccaatgacaataaaatatgtccaataataccagttaacctccctagactttaaaatatatatgtggaagattactacaaatgttaacatttctaaatattttttcttcggtttttgcctaaatgtttgcataattcatttacacaatgagttcattttgcagaggatcctttttttgtatatgatattgtttcatttcagggtcttagaaaaattggcaaaatacagaactaacataacacagcaatttaactaaagcttttatagtgggaaaaacacaagatggaaatttttcagctgaatcagttccagttattaaaattgcataaacatttgctgcaacacatatggattacttatttgtttctcatgcctattatgttctttaatatcaaaacaattttataaaacaatgaagaaatggcatgatttggaagatggatgatgtctataagtacatttcagaattattactcaacttcaygtattcaacaaatatttgagtttctactgtgtgagacactgttttatgggaagttgggggagaagatgccttattttttacaatgtgcttttagaagttacataattatctggatttgtatctgaggagacaactattctaaacacttcctgaaaaatactttccttgttatttcacctaccataattatttttctgaaaatagtttattttaaaataaaattaaggaacacatgtcataccatattagtggtagtgaacttctagttaaaaagtctatgaaatgtcttctttgtgtaatgttagttaatatttactttratatttttaactaaaaaatagtttataccaaaacgtgccaaatgtgaaaaaaatagtaataactaattttttattctaaaaattgccatgcttagaatatatgtagtcagtttttaaaagtgaataacactactgttgttttgtatttttttattttaattgtgttatactggctctgtgttgccatttgacttaaatatractgagtggggggtggtgaggagatcctactttttactgggagaaggattattggggaccaaactccttagggagaaaatggcctcaaaagtctgtctaaatacttgaaatttcattcgctatctgagaaaatgtgtaaaaagaatcactaggctacggatttctcgagcaatcttttgtttaagtctaactctctttggtggtcctgtgggcacactggggtctctgccgagttgataattcatttcacacatttgcacctgctctgcagcctgaccgagagggcgcaactgctcaagaacgtctttaagaagaaccacgtgaacttgtaccgctctgaatccttgcaacaaaatctgctccgtgagtatttgagtttcttatttttaaataaattctctgccattgctgtatcatagcatttatacagtatcctgactttagggatatttatttaaaactaatgtctaaaataagttttgcatatttgtaacctgtaaataacagaaaatccattggtcagaaccatttcactttcaacagaagagatagttaattttaaaatcttgctgtttcacttaaagaaaaacagtatttccacattccttgcttcctcaaatctttttctttaaagccagtaaatcttaattcttaaaagctgcccctgtcttgttatcttttctacttgaataactttgcaagagcctttcagctttcatacaacacaaggaagcatatattttccccttcagaaatatttatgaatatttagagttgtaagacattattagatattgtgccctcttaacatttcaagatctaaaaaagaatataaaatgtaaagccctgtagtaaatgtatttgtgtgagtaatatatcttttgtttcatgttgtttccacttataatttattttcacttacgtatactcatgtctaatgcttttgctctttatacttcaagaggccttttctaaagatgtgatccccttgggggccattccttatgcccatgccatgtcggggcgtgagtgagtttatttgtgatgctgagagccaaggggaatgtcctctgaaggaaggagaccacttgccaccatgagcagctatttgtgtttatctcctcctcctcgcctttttaaattgacaaacaataattgtctatatttatggagtacaaggtgatgttttgatgtacagttggccctttctatcagtgggttccacatctgtggattcagcccgctgtgagtcaagtatattcaagggggrraaaaaaattcacaaaattcctaaaagcaaaacttgaacttgccatggacgaaatactacattgaatccactagaatgaactgatgtgagggcattgtattaagtattataagtaatctagaaatgattttaagtctacgagagaatgtgtgtaggttatatgcaaatactgtgccattttatataaaggatttaagcatccgtggattttgatatttaagggggtccctgaagccattcccacagataccaagggaccgtacatggtgggatggttgaatcaattacattattcaccacctcacctacatatcacttttcctttcctctcatccacctgacctatgtggaaatatgtgagcccacttgactcaactccctcaccccctccagaattggggaagcaaaaattagaagagttggagttgacttacgggacagaggatttaggggaattgagggtgcctactcagtcttctagagagaagaatacctagaatctaaactggcaacctaagatcatcccactctttattttgaagttaagtctgtatcttttctaggcattaaaaatcagtgtctccatgcttttgaatgtgggaaggctgcatttgttccccaggctagaaaatgaatacccaaaagtcagaataacggtggtttccagtgcctttgtgagaatttctgttttatcattaacctacagatgggtatgcgttctctcaagatgaaaatggaatcgtttcacagtctgaagtgataagagcatatgataccacgaaacagaggcccgacgaatggtgatggggagagcctgaaaggcaggctctgttacctctctaaggagagctaccaggttgtcaccgcagtctgctaaccaattccagtctggtccatgaagaggaaaggtagatctgagctcatctcgctgatggacattcagattcatgtatattatagacataagcactgtgcaactgtactgtaacaccatctcttttggatttttttaaggtatttgctaagtctttgtaaacggaaattgaaaatgacctggtatcttgccagagggctttcttaaacggagaataagtcagtattcttatgccattactgtggggctgtaactgactgtcagtttattggctgtaccacaaggtaaccaaccattaaaaaactctaaatgatatttagttaaagggactcttggtatccagacttagatttcaggatatgctgaaacaaaccagcattcttaaggaactgactcaccttcctgagcaaaatttctaaacaagcatttgtgtccaaaattgtcttgataaatgtttgccaaagaggttcagtaagtgtttttctagttcagtagtcatatgcccagaaatgtaagagaaagtttacttccagttccgctgtaagatctgcatgcctgactttccaaatgtaagagtgatttacaaaaatgaatatttcaaggcatttgctactaaaatcggtgatgttgcacctttggccttacaaatgcttctttgttgtttgtcgtgtttatttgttagaggacacacgtgttaatgtgactctgttgttatgacactgatttttcaaactatgtatgtttcaggtatttctgatgaagtttcatcatcatttagatttttctaaaaatctggctaatgcagtagattgagtgatgtcattttgtcttaaagtttttcctcttaagaaacatatgctacgtatttacgtgggatttccaaagcttctgttgcaatatttggaataacatgtcagataaatgcatgggcttttgtcctgtgttccagttcccactagagatgcctgtgtcttgtgtagcacacccagtgttatggtgactgccccctatactgaagactgaaaattatttcacagttcactcatcaaatagttcccaaaattcgtcacatgctgcttattgggacaaataggtagtacattttccccatttaaaaaatgcggattttactcaggccggtaactttacagtcagaggacacgttcatcatgagtagcttttgttagtatgttttaaaatgtatcttcagttcaattattttcagcatttacaagacatctgaaaatggctattttgctaccaacagtaaatgaaggggctgtttaaaaaccacaaccagttttctacactattttttaaataatactttcatttgaaaaaaaggaattagttttcagatacacttcagagattgaagcaaactatttgccttttactcaaaagcctgcttgcctttacatggacttaccagcaaaataggtagaactttctcttttaaaaaaagtcaactagaattgagaagaggtgattttttttcagatcgcttctcgagtttaatattttcacattcttttcaccctttttctcaatctagatttaaaattaggatatatgtcatttccttgtctgtatttgtagctccttagttaccagtatgcctctccattttctacaaataagaggttataacacatatacataattctaaccttaagggaacacacgtttacatactttacttcccaagcccttcctgtttggggtacagattgagagagtcatgaatcaacacatctagcaagaccacaggtgtaagagtctaagatcgtcttcaaaattctgaagtcccagtctttacctgtccagtgaatgaatattcagagcagcttttcctgggcttcccagtggtgatagctgaggtcaaaccacaaaaaataagaaagcaagagtgaaatgcacccctccagagaaacactttgtagtgtttaattctgttaatagagaagagctgcttctgtttgcgctcacttcatcagtggcacccttctgcagaattttaatataaaaacattatggatataatagaactggattttctgacttaaaaatgtaagttttattttaatcttgaaacgtggattgtttctgtggagctcttaaacatgagaagaatacttacggttgataatgtgtaacatgatctgaaatgtgactaatttgagcctctttgtcccatcgtcctgtttttgaattattgacattgtcagtctctttgcttcctgggtgagacttggggtttgagggacagggaatgaccttcttggtgaaacttaaaatataacattgcaattgcagtgactttacagtgttaaattagagaaaatagtctgattttttaaaccttccttaactggaaaaaagtcacatggttttaccaggattgaaataaacagtcaatgtgacttttaacatgtgtttttttgaaataaaggrcacgtactcttcaattaaaaagttccttatagggactctggcaaatgctaacacagttgctttacaatgtttacaattcagacaatacgacttataatagaaaatcctcattcatttagcattgaaaagctggaagttgcttctttaatgttgaatagtatacagtggtattgagcatggactttctaaatgttttatatatacatataaaaatatattggtgtctcacacccagaaagatgttatattgtagatattattaggaaaacagtgtttctcaggaacgttgtaaattttaaatgatatatgtacttcccgtcctcccacctccactctgtgctctaatgtgagactgcttcagcagtgttgctaagttaatggaaaactttttctaatcaagtcaggtgaatgtgtattctgctaaataatgttagccatttacatgaattgtatggtcattaaatggaatcagtgattcctctttaatttccagaggggaaatgaattatggaaatcagtcagcattctgatcattaaattttatactttaattttgccgttcagcattctaaatatccaatgtgaaagtcacatgataatttgttttgcattgcgtgcactgtacaacacttacaacttgtcatttaaaatgttttctcgggaaatgaatgctagtcagaaagtaatagattgtattattcatagttttaaaattatgacaatgtcataattactacaaagctaaataatcgtgtttatttttgtgcagttgccctttgatagttcctggttttaaaacctattaagtgtataatcttacaaatagtcatctacaaaatttatggagaaagtgcccagcccattcacatcacatggaccaggaattcttttgtaaatgacttaaggtaacatcatgcagttcagtgcctaataaatgctttttaatgatgarcatttctataatgactcgtaagataccatagtctgatttttctcacattaaaataactgaagtcacttgtgtaacgtagttatactttgctgcattttaattaaccttcaacagctattaaagtggaatgtaagttaaattttgaaggaaaggaaataaatgttttccatatttcgtcttgatttactttctgtatgagaacagctgtgtttttgataggtttatggtttgcatgagttcatatttaaagtgatccaggccaatgcatggctattgctgtaaatcttgatgtttatttctgccttgtaaagttctatcacggcctacctggaatttaaaattcagtagacaaattaattggtcctctgcacaacttttttaataagtagattattttacaaagaaatttgaacaaatttaattgaatcttttgtttagcttgcctctaagaacttttcttaataaagctcccaaaacttctcagcaaataaatctcccttaagtaggaaaactagatttcatatttgcttactttgaattaacagcaactttccacaggtaaatctgttcttgcaaagatgtgagcagaatagttaaaaataatatttttatgtttcatggttctaaatggaagccataaatgcagtaaatactatctgttgtttaactactttaatcgtcattttttacattttcaagtttattaggttaagaaaaacagggcagccttggaaggcagctactacagaaaactgcagttttgcgttaaagataaagtagtattttcagctccctgaaaaaccattcctgctgaaactgctgtagaaattgtgaagctgcatgagtggrgagtattgaatctgtggttatagtagttttctcaggtttgtttatcttgatgtttgatgcactgtgttttatagttattaaaattgagtaatattatttctatgcagtgttatgtgtcattggccttttgtgaatgtgcatgttttaaactgcaaattttaaacattttgtcctctaattgttattaaaaatgaaataaactttaccattacttaaaattgttgaagttttgattgctagttctagaaattatattgctttctaaaaccttcaaatccagcagtaactagtctgagaaggtgtatcccagtgatttataaaatatcccttcattttaatccagctaaataaaacatgaaatggagtgtattaactctagtttggtaagatgggtagtttttataattagcagaattttttaataaaattactgtgttttgtcacttcagtacgaaaagcctcccaggattgtccctgttgcatatttaaatcagcttgcaagtaaacagcctattcatggtttcaaccttttatgttggatgaatttgttttctaaaccaactaaactgttttaagttcatgagaaagtgctcaagtttagccaataacatttgaaggcagtaaccagaaaataataaaattgagcacatgagacaaaagtatagacagcatcagaaataagaacaatcacttcagcaaaaataagtgtcctttggtaaaagagaaacaactgaagatacaattaggtaaattactagaataggattagttctcaaagaggcgctggagaggcaatttgaggagcatctgattttattagactgagaccatgcgtgcttacctgcctggagccccatgtcctctcccacagtcttcccagggacgacaattgggtggggacctccatgcaaaaccacagcaaaacagttcatggatatgttacctctgaattctatcaaataattttcacattcaactccattctccttaaaataagcacgtgcttccactgacctgtattttaagatgccttctaatactaccataagcaaaaagcaaactggaaatacatttccataaattcaatatgtcatctccatttaaattttgtttttgtatgcatagggcgtctctaaagttttcagtaacacagaactgcctcactttaatgaagaaaggtcttcctaacctggataatttcatgaataggctaataaaatttgttggaaaatatgaaatacctcttgccattcagtttttattactttcaagtcatgaaactagcaatttaaataaggatttcctgtcagaataatgtcattaactactgtttaattgcaattttaaaatagccatgtacatacaaaaatatgttaacagtttgttcccttaatagtttaacatgcctgtaaattattagttttcctgaacgtatactaaataaatattttagattatgcaaaggtaaaatgatgccaacccagtgaaatttgtcagattcctggttgtgactgtatctactttcaggaagttttttgattatctcagtttagaaaatttcctatggattcaagtcaacctggtaaattctccaccatgagaagtagctaataataacaaaaataaaacagctggggaaaataaggaattatccatttggacaagtgtacaatctgttcactttggaacataaccattttaaagcaaatttactatgtcaaatgtgcttttttttggttagaaaagcacatttattttaaaataaatttgtctcaaaggaacagttatttttttgtttgtttctgagacggagtctcactgtgacacataggctggagtgcaatggcacgatctcagttcactgcaacctccgcttcccaggttcaagcgattcccctgcctcagcctcccaagtagctgggattacaggcgcctgccaccacacctggctacgaatgtgctctctaaagcagatgatgaaagaaaggtacagaccatgagtacccaacaggatgagaggatgccctattccagacgagcaggaagttggccaagtaccaaaggggcccatgggttatcaaggacttacttgatcaaactgtaggaccattttctctgttccctacccctaatcaacagtgatatctgccctcccgcagtacttagcctttcatttttattctaaagtatttcatctgctttctgttatttatccttactacacagctttctgcccactagaatgcaagtgacctgagacagtgtctgtaacttcttctcaaggcaaccataagcaaaaaggtagtactaatgtctctattttacaaatgagaagactgagacacagtgaatttaagtggcccaaagtcactccacttttaagtgacagagccagaaaactaacccaagcattacagcttcaaaatccatgctcaatcaccctctggaatcccatttctcatgtgtaaagggagaaatatttatcatctagtgtttttattcatgctttattttattccacattttcataatgcagcataagctctccgtgacttacaatcccctgatatcaataggatatgtataatatgatgcaattgatcactatttccccaatagattttctgaaaagtacattggatatttttgttttcctcacaaaattagacctcctaggtctaatgtcacacagaatgtagaatttccaagtagaccacctgggttcagatctgtcccctatggtattatccgtccttgggcacagtgtttaaccttctcgccttgatttcttcatccgcaggataggcatgatgataatcccttcttcagggttgtgaagattcagtgatacaattcataaagcacttgggacacacatggcgcttaataaatgttatccattattggcataacgacctttcaaaatgcagaacttctatttttcacaataatcgtggcatgaggatgttggattcaaattctttctgaaagtaacaaaagcagacaagtttctgctgtattttggtggtttagcagattgtgatgagcagctccttggaaactccaaaagattttatttgacctttgcagcctaatctttctaaaatggagatatgatcccatcccctcccctgtaaaatccttccagactccctcttgcatttgacatctattcaaatgccatggtgttc

SEQ ID NO: 94041 - DNA, 70271 bp, Homo sapiens
  misc_feature (1)...(70271): n = A,T,C or G
nnnnnnnnnnnnnnnnnnnnnnnnnnnnnnnnnnnnnnnnnnnnnnnnnnnnnnnnnnnnnnnnnnnnnnnnnnnnnnnnnnnnnnnnnnnnnnnnnnnnnnnnnnnnnnnnnnnnnnnnnnnnnnnnnnnnnnnnnnnnnnnnnnnnnnnnnnnnnnnnnnnnnnnnnnnnnnnnnnnnnnnnnnnnnnnnnnnnnnnnnnnnnnnnnnnnnnnnnnnnnnnnnnnnnnnnnnnnnnnnnnnnnnnnnnnnnnnnnnnnnnnnnnnnnnnnnnnnnnnnnnnnnnnnnnnnnnnnnnnnnnnnnnnnnnnnnnnnnnnnnnnnnnnnnnnnnnnnnnnnnnnnnnnnnnnnnnnnnnnnnnnnnnnnnnnnnnnnnnnnnnnnnnnnnnnnnnnnnnnnnnnnnnnnnnnnnnnnnnnnnnnnnnnnnnnnnnnnnnnnnnnnnnnnnnnnnnnnnnnnnnnnnnnnnnnnnnnnnnnnnnnnnnnnnnnnnnnnnnnnnnnnnnnnnnnnnnnnnnnnnnnnnnnnnnnnnnnnnnnnnnnnnnnnnnnnnnnnnnnnnnnnnnnnnnnnnnnnnnnnnnnnnnnnnnnnnnnnnnnnnnnnnnnnnnnnnnnnnnnnnnnnnnnnnnnnnnnnnnnnnnnnnnnnnnnnnnnnnnnnnnnnnnnnnnnnnnnnnnnnnnnnnnnnnnnnnnnnnnnnnnnnnnnnnnnnnnnnnnnnnnnnnnnnnnnnnnnnnnnnnnnnnnnnnnnnnnnnnnnnnnnnnnnnnnnnnnnnnnnnnnnnnnnnnnnnnnnnnnnnnnnnnnnnnnnnnnnnnnnnnnnnnnnnnnnnnnnnnnnnnnnnnnnnnnnnnnnnnnnnnnnnnnnnnnnnnnnnnnnnnnnnnnnnnnnnnnnnnnnnnnnnnnnnnnnnnnnnnnnnnnnnnnnnnnnnnnnnnnnnnnnnnnnnnnnnnnnnnnnnnnnnnnnnnnnnnnnnnnnnnnnnnnnnnnnnnnnnnnnnnnnnnnnnnnnnnnnnnnnnnnnnnnnnnnnnnnnnnnnnnnnnnnnnnnnnnnnnnnnnnnnnnnnnnnnnnnnnnnnnnnnnnnnnnnnnnnnnnnnnnnnnnnnnnnnnnnnnnnnnnnnnnnnnnnnnnnnnnnnnnnnnnnnnnnnnnnnnnnnnnnnnnnnnnnnnnnnnnnnnnnnnnnnnnnnnnnnnnnnnnnnnnnnnnnnnnnnnnnnnnnnnnnnnnnnnnnnnnnnnnnnnnnnnnnnnnnnnnnnnnnnnnnnnnnnnnnnnnnnnnnnnnnnnnnnnnnnnnnnnnnnnnnnnnnnnnnnnnnnnnnnnnnnnnnnnnnnnnnnnnnnnnnnnnnnnnnnnnnnnnnnnnnnnnnnnnnnnnnnnnnnnnnnnnnnnnnnnnnnnnnnnnnnnnnnnnnnnnnnnnnnnnnnnnnnnnnnnnnnnnnnnnnnnnnnnnnnnnnnnnnnnnnnnnnnnnnnnnnnnnnnnnnnnnnnnnnnnnnnnnnnnnnnnnnnnnnnnnnnnnnnnnnnnnnnnnnnnnnnnnnnnnnnnnnnnnnnnnnnnnnnnnnnnnnnnnnnnnnnnnnnnnnnnnnnnnnnnnnnnnnnnnnnnnnnnnnnnnnnnnnnnnnnnnnnnnnnnnnnnnnnnnnnnnnnnnnnnnnnnnnnnnnnnnnnnnnnnnnnnnnnnnnnnnnnnnnnnnnnnnnnnnnnnnnnnnnnnnnnnnnnnnnnnnnnnnnnnnnnnnnngatcgcgccaccgcactccagcctgggcgacggagccagacccagtctcaaaaaaaatagagcaaggataagacgcggctgcttggtggccagaagcaaacggtaaacatgaccggaggactggcctgccataagcagaaaacggatgaggcccggcgcggtggctcacacctgtaatcccagcactttgggaggccgaggcaggaggatcacctgaggtcaggagttcgagaccagcctgaccaacatggagaaatcccgtctccactaaaaaaatacaaaattagcggggcgtggtggcgcatgcctgtaatcccagctacgcaggaggctgaggcaggagaatcacttgaacgcggcaggcggaggttgcggtgaaccgagatcgcgccattgcactccaggctgggcaacaaagaatgaaactctgtctcaaaaaaaaaaaaatagaaaaaacgtgtgagaacgtgaagctttttacagacacttagctgaacaaaattcttcccagaggagaaaccaagtggtaaggatccctaactgctgttgtgctcatcgctgtctgtccatatcaggcaagccctagagaggcaggtacccttagggtctacatggtgtgttggaacttggagcttagagacggttactgactgccctgcttcaggacacaggactgcactcacgtgctccactccactgccctgccccaagctcagtgatggcctccaggcagggggaaggctgctgctgggataagtacaagtgatggcttttaccttacatgctttatgtgggttacctcatctcatccttaaaacagtcctgggaggtgagtgtgccccaggaggcagtgggtgctgtttgcctgcgtttcttcttgtgtgaaatggggacaccagtggcctccctcataggggttgtcatgaaaactgaatgagagcatatgtggagtactgggacggtgtgatacagtaaccagtcaatggtagctctctgtgaatgagagcctgtgtggagtactgggacggtgtgatacagtaaccagtcaatggtagctctctgtgaatgagagcctgtgtgtagtactgggacggtgtgatacagtaaccagtcaatggtagctctctgtgaatgagagcctgtgtggagtactgggacggtgtgatacagtaaccagtcaatggtagctctctgtgaatgagagcctgtgtggagtactgggacggtgtgatatagtaaccagtcaatggtagctctgtgaatgagagcctgtgtggagtactgggacggtgtgatatagtaaccagtcaatggtagctctgtgaatgagagcctgtgtggagtactgggacggtgtgatacagtaaccagtcaatggtagctctctgtgaatgagagcctgtgtggagtactgggacggtgtgatacagtaaccagtcaatggtagctctctgtgaatgagagcctgtgtggagtactgggacggtgtgatacagtaaccagtcaatggtagctctctgtgaatgagagcctgtgtggagtactgggacggtgtgatacagtaaccagtcaatggtagctctctgtgaatgagagcctgtgtggagtactgggacggtgtgatatagtaaccagtcgatggtagctccctgtgtgacacttatccccatttttcagatttcttactgtccctggattaaaagtgagatacacagctcagagaaagcagttttgggaggaaatatggtcccagtgagcagttttctagtctacttaatccaacttacttgaggcaaggatatttggaggactggcatagagggccgtgcgcccctgttaagaggtgatgcctcgtaaatagcacttcattcactcttgattttgataaagatctgggactcagaactgaggctgttctctagcaagatttggaatatagtttttctgtgtttttgattacgggtgcattcaactatttaaaagattaaacctttattatacagtatggtggtgtatcagtttcctattgctgcagtaacacatgatcacttagtgactatataaatttattctcttacggttttagaagtcagaagtcgtaatatgaaagtgtctggttggttatatttattgtgatggttcccgggggagaatctgtttccttgctgcttcttcatcttcagaaccaagggttgcatctcctctcccccctaccctctctctcccatccctttctccttcctgactctagctctcctgcctcactctacaaggattcttgtgattacactgcgcccacccagctaagcagaatctcaaggcccttaatttagtcagatctgcaaagacccttttgtcttgtaagataacattcacaggtttgggggattaggatgtgggtctttcatggggggtgtcatcctgcctgcctaccacaagtggttataatctttcatgagaagtaaggatcctagtcttggaatatggtcattctgctcttgagttgaaggtgatccaaggaataccttcagacaaaggaagggtcttcctttctttttttatcttgttctttttttattttattttttttttagacggagtctcgctctgtcgcccaggctggagtgcagtggcatgatcccagctcactgcaagctctgcctcctggattcacgccattctcctgcctcagcctcccgagtagctgggactacaggcgcccgccaccacgcccggctaatttttcgtatttttagtagagacggggtttcaccatgttagccaggatggtctcaaactcctggcctcaagtcatccaccctccttggcctcccaaagtgctgggattacagttgtgagccactgcgcctggccctcaacctttttttgaggtaattgtagattgattctcatgcatttgtcagaaatgatacagagattcccgtatcacttcaccataacatcttgtgtaagtagagtacaattgtcacaactaagaaattgacattgagacgacccatctaatttattttatcttattttattttatttatttttttgagacgaagtttcactcttgtcacccaggctggagtgcagtggcgcaatcttggctcactgcaacctccacctctagggttcaagtgattctcctgcctcagcctcctgagtagctgggattataggcccaccccaccacacccagctaatttatttatttatttatttatttttatttatttttttttttttgccggagtctcgctctgctgcccaggctggagtgtggtggcgcgttctcggctcactgcaagctccacctcctgggttcacgccattctcctgcctcagcctcctgagtagctgggactataggcacccaccaccacgcctggctaagtttttgtatttttagtaaagacggggtttcactgtattagcaggatggtctagatctcctcacctcgtgatccgcccgcctcggcctcccacggtgctgggatttaattttttgtatttttagtagagacagggtttcaccatgctggccaggctggtctcaaactcctgacctcaggtgatccacccgccttggcctcccaaagttttgggattacaggcgtgagccactgtgcctggcctgacaatccgtctgttttattcaaatcatgtcagtgttacatgcactctcatgagccaccgcgtctggctagttttatgcatttttagtgtcccaagaggcaacagtgtctagccatcatgactctttttgttagtattctggttataaagttgaacaggttttgaagggcctgccctaattgtgtttttccaatgagtccttttatcttaatgagcctttttccaagctcggggtttttcaggaatatatataccctgtcatatccgaaacacttaacactaggtgggatgagggttgcagaagtaggtggcagtcggatcacaaggtcaggagatcgagaccatcctggctaacacggtgaaaccccgtctctactaaaaatacaaaaaattagccaggcgtggtggctgtcgcctgtggtcccagctactcgggaggctgaggcaggagaatggcgtgaacccgggaggcggagcttgcagtgagccgagatcacaccactgcactccagcctaggcgacagagcaagactccgtctcaaaaaaaaagaaaaaaaagaaaaaaagaagcagcagcaggtggcattacaaattaagcacggggttcccttctttcactcagggatgatggcgccacttcctcagtttcgkcactcaagcgcctggaacggagtcagtggacggataagatggatttgcggtttggttttgagcggctgaaggagcctggtgagaagacaggctggctcattaacatgcatcctgtaagcactaggtccttctcccacccaggaatatggctgcaacccttctggtcatagcgtggtccttatctaaagagtgggggacacatgagggaactttgagtgaatcaggtgggagatgtgaaggttcccagctctcctttcctctttaacgtcattgagggccacagagaggccactgtgagaagccggaggtgatgggcatctcttttagccatcagaataaagctttcaaggattatgagggagaaattgagagagatccccatttggaggccgttacagtgtggttcttgtgaataaggctggtagtgttaatgtaggggtggagtaaagacctagatgagagggtttgtttctaaagtgctgagtttcccgaaaggtaggaggaaagtttctctaactgtgtagaggatggtcttgtgtctgtgttgactgattctcttgtagaccgagattttagatgaagataagcgcttaggcagtgcagtggattactactttattcaagatgacggaagcagatttaaggtaagcccctgactgcgacaagctaaaacccacttttatgggtgttcatgtagctctgtgactgtcagggagggcatgggaggcttccagtgcacagcagcccatagcccagcagaactcgggcccctggaggccccatcagtcatcacgtaagatgtcctgagagaggtcagttcaggaagactctgaatggtgagaagtagcgtgtctttcagattcttgcccctgtgaaaagtgcgcattctgacttcctgtatgctaccaaggtcaaggctaccctggccctagrctgttcatgggatataggagcaagcaatgtgttttcacttttctctcgctttcttctttctcatcacccctggatgggttggtgactcttaacaggtggctttgccctataaaccgtatttctacattgcgaccagaaaggtragtgtgtttcatagactcaggtcagacgacctgtgtgtcattctgtggtgggctttgcaactgggaaataggcaaggaaggaaatgtattttaccaatggaaagccttttcattctgatcctgattagggttgtgagcgagaagtttcatcttttctctccaagaagtttcagggcaaaattgcaaaagtggagactgtccccaaagaggatctggacttggtgagtatcacccagactttccaggggtaaatgaggccagagtctacattgttcctggcaggtgggatcggaagaggtagaaattcaggtcatctgttgggtgatggggcggtgtggtgaccgtctataaaattccttccaaagagctctagtggtgttagttggtgccacgtgcagagttggacaaggtgccttgaagtcgccaactctttgacttgtgtgtttacctttgagtgtttaccctctcacccataaagtcctatttctcttgaaccaatgagcgtgatctcttcgcattatagccaaatcacttggtgggtttgaagcgaaattacatcaggctgtccttccacactgtggaggatcttgtcaaagtgaggaaggagatctcccctgccgtgaagaagaacagggagcaggatcacgccagcgacgcgtacacagctctgctttccaggtaaactttggtcttgtgagcaaagcatcagcggttcagaaygacaagatggataggagacaggaacacgtagcaacaaagttaccttaatggctggctctgtttgatacggaaaacttgagcaattaggtagagatttctgtatgttctgtgttaaataaacagtggcttcccaggttatattttatgtgttagctctcttttccaatggaggggtgggtttatggctctaaaattgagtggttgtaatagtaaagtcaccttagaggggaaaagatccctcatcctactgccctaacacaatccatctatgaatttcattaagtgctgagatttacacagcacatctccagagaaccttgggtatcgtccacagaaatttaagcctagaacactaaacactgttcttcaagtatttgagcatcaacaataataggatgcaaagtaaccagttaggaagagaaaatcttgagtaatgaagtttagatgacttcggaagaacctaccttaccctctgacaaaagaggatcagtttgggatgctgaacatttctacagtccctacccggagtccgccttccctggcaatgccacaagttgctttttgaaatattggaaggtgtgatcagagactgagtcctcagagacttgagccatatctgagactcgtctgtctttttccccctgaatagcccgttcagtatttgagcttataggccaatagtggccgcaatggtgggccacttctttagacatggcagagacccatgcacaggctgtgtgaagcccaggcctgctcttcagcctgcatgaggcagcctcctgagtatcaggaccatggtgggatggtcatgcctggctctcctgactggcagcacttaatgttttctttcttttttcttctatttacttatttgttttgagacagggtcttgctctgttgcccaggctggagtgcagtggtgcaatcatagctcactgtggcctcgaactcctgggctcaagcgatcctttcacctcagcctcctgagtaactgggatcacaggtgtgtaccccatgcctggctaattattattattattattattacttttgtagagatgagtctccctatgttgcccaggcctgtcttgaactcctgggccgaagcgatcctcctgcctcccagagtgctgggattagaggcataagccaccatgcttggccctctttttttttttctagttggggtgtaactcacatcatataaaatgaatacatcttacactgaattttctcctgtctgtagagttatcatccaagctattctttatttttttgagatggagtctcgctctgttgcccaggctggagtgcagtggcgcaatctgggttcactgcaacctccgcctcctgggttcaagtgattctcctgcctcagcctcccaggtatctggggttacagacatgcgccaccacgcctggctaatttttgtatttttagtagagatgaggtttcgtcgtgttggccaggctcgtctcgaactcctgacctcgggtgatccgccttccttggcctcccaaagtgctgggattacaggcgtgagctgccacgcctggcccagtccaagccattcttaaaggaaggactgccttggtcgttgaaaccacatcaatttaccttttgtgtttcctcggtttgaactctggtctcacctcttcctactgagttggaactctggtctcacctcctccagaccctggcagctgagttagttgctctcttgttaattcctagtgttctgcagaggggcggtgtcattactgatgaagaggaaacctctaagaagatagctgaccagttggacaacattgtggacatgcgcgagtacgatgttccctaccacatccgcctctccattgacctgaagatccacgtggtgagtggggcagggttgggtcgctgctcacatgaatttcctaacagccaggagatgatcattatgggtgaatccacagargaatagactttcctggatgtagaactctagttagcacactgtgtgttttgcaggctcattggtacaatgtcagataccgaggaaatgyttttccggtagaaatcacccrccgagatgaccttgttgaacgacctgtaagttttgcttgtgttaccttcatcctaaaatttccagttttctggagagaatattcttcagtgctggagagtgaatctgactcaaagatatgtttgctgcttttcccccaaatactttattaaaggaaatatggagttagaatttttcatcagtttctgacagtatcatttccttttttgttgtatatcactgtatgacatcagtgtttgagctaggcaggatttggacactcgagggaaagctgggacttccgtttgggtagttgatagtgaagggacatggtgaaaaatggatttgtaactagaaggccttggttcaaacatgactttgtggtgttgggaaagtctttgtattcagttttctcttttccgaaatgaagatatcatctctgtgccacagttacctttcagagttgtcataaccaccagaatgaggtgatgtcttttgaagagtttttctcctaaagttctgtgattttaggcttgtcctgtgatcagctgctctcttaggtatgtcagttttcataccatagggagtcgtgatactcttgatgtaggttggttagtcttagggtccttctcccagctctagagccttttgactcttttaacaaccagagggaggtagagcaggcygggggtgggtgttcagggaggcctaatggggagtttagagcttggctttatgcttattttgtccccacaggaccctgtggttttggcatttgacattgagacgaccaaactgcccctcaagtttcctgatgctgagacagaccagattatgatgatttcctacatgatcgatggccaggtgagcaggtggcttctgggaagtaagctcctgggatggggaccttgtctggtccccatactrcagcagcatctgccccactgttagtatttgttgagtgaataatgagttagtccaggaatgggagcaaccaagccgttccgacctccagctgtaccctcccctttcgagtgggaatccacacrcagagcgtctcttctcaggaagcttaaagcactttcacattgctgtggacttctttgtagtgagaatctctaggcagagtgtgtgggcagggtgggaacgccatttcttggctttgcagcctctgacttgtgctgattgctaatgaacttsgctagggctacctcatcaccaacagggagattgtttcagaagatattgaagattttgagttcacccccaagccagaatatgaaggccccttttgtgtcttcaatgaacccgatgaggtaaggaggtatcacttgggaaactacccggtattgtgggaagaacggacatgtggatctttccaaggcctcaggcattccgtcagatcagaattgcagctccatgagctttgttctcagggtrtgaccgtcttttctgccagagacgggcggaggggcggggcaggaataagggccaacatgaggctgctgcttctgaactttgggagaggaatttggaatagcttgaagaagagaaagagcagacctctgactgctgtgacttgggttcaggctcatctgatccaaaggtggtttgaacacgtccaggagaccaaacccaccatcatggtcacctacaacggggacttttttgactggtgagtctgtgtcttctctatgagtaactgggcagcatttgagagggagggcgttgcgtggtgcaggggcgcttcccatgtcgacttaggaggtggctcctgggttcactctgcacctcccgtgtctgggttcctccctgggtctgagggaggaatggagaaaggggcattagagcctgacctgcccacttgcttgtctgtcctctttccaacccaggccatttgtggaggcccgggcagcagtccacggtctgagcatgcagcaggagataggcttccagaaggacagccagggggagtacaaggcgccccagtgcatccacatggactgcctcaggtaggggccacagagcagcatggctcctcactgctgtccgtgagygagatctgaaggcctcttgcagactgtgctgtcaccacatctcatgggaggagggtggcctccgagaggccgtttcaggtcacccaagagtatggcagctgcaaccctgccagggcccgggatgtgctgtctttgactgttgactgacaattcatcagtgaccaggcacattgagcatcagcctctggggtggggaagccgctggaaagacgcactcagctgacaggtcccagacctaggacctcatggagctgctctgcccaggcaaggttgggatgtggcagcccggctgcctcacaggacaagcctcacgggacaaccacagattccatatgagctagggtgggaggcagctcagagcttcggagagtcacggcgttcgggggctctgacatgactggttgggaagacaggtggatgtggaaatgccaacagaaggaggctggaagggaaggaagggaagggagggaggaaaggagggaagggaaggaagggaagggagggagggaaggaagggaagggagggagggaaggaagggaatggaggggcctccacggcctctgtattctgcacagtgccactggggtgcttgcagcctgaatgcgtttctgtttagctctgatgctcagcacttggcttggagagggaggccaggaggctggggccggtttagcgtgtgacggtgtgacagtcctgatccaaggcagggagtgagggttgtgaggattcaggatctgtcatgtggggcagggggaggcccagggatgctggttcttagggaggggttggcacctggggtttttgtgccatccgtggagacagggaatgggtagagaaggggcttgaggcaggaggtgaccctgctaccgatatgctagcctggaagccccacccatatgggggccctgaagaccaccatgaggcttggtttgggctcgcactgtagattgggactcactgggttgcgggtgggtcttggtgaaagctggggtagtggatgaactgaaggcaagaggtaaagtgagagaagaaggccacagggtggaggctgcggggggtggagaccggacatgacccctggacagctgctccagggaatgcgtctgtagggaggaggtagagacaggttccgggtagagtgtgggggccttcttttcttaatttttattttttatttattttttaaatttttattcttcttgscatctgatcacatcttgccttctattaaaggagggtgggcttgagtgtttccgtgctgaagggacagtgtgaggagagaagatcagtgtggttgatagaactaggccccaggggtgcagacctgaggtctggggagaggcccaaggaggtggggcgcccgtcggmgaggccacaaactctgctraggatgggaggaaggcgagggccggaaggaccagtcctggtgcttccttgtgttgtggataggtctgtgagattaactagatcctgatgaagggttttcacaaggtgyctacaccatgtggggccttggtgtgaggctcctgggtgcctgttaggaacttgcatctgtctgtgtggtgcccagttttgccagttctcaggggttcccgggctgcatgttagaatcatcctggcttctgttctcattctccttccaggtgggtgaagagggacagttaccttcctgtgggcagtcataatctcaaggcggccgccaaggccaagctaggctatgatcccgtggagctagacccggaggacatgtgccggatggccacggagcagccccaggcacgtaagccacatcccggctgcccctgctgccgtgtgcacncatccagatggccayggagcagccccaggcatgtgagccacatcccggctccccctgctgccgtgtgcacgcatgtatgccagcccgctccacccagcagkctgtgtctccgggacacacgtgttttgtcctgtgccggtctccttactgtgtgtgcggcaggctggtcaggccaggctttgctttctgtgcttcacacttgaccctgggctcttgatttttgatggccctgctctctggcgttctctcctcagactctggccacgtattctgtgtcagatgctgtcgccacttactacctgtacatgaagtacgtccacccattcatctttgctctgtgcaccattattcccatggagcccgacgaggtgagcattatctgtcctgtcggcaccctggcctcctcagcccttgccccattccaaatgcactggagctgaatrgaggtggatgtcccaggagtgctggcaccagaggcggcagtagaattctggtgtgtgacgtcagggatgtcctttgggaattctctggccctggtgtgaggaagaaaccacaggaggcagaatttgcagccatttaccacgaggttttctctcctttcacactgaagttcagcttaggttcctggactttgcctgcaagtcagggcctttggtgttgcttttggctggaagccttggtttctcttgcaggtgctgcggaagggctctggcactctgtgtgaggccttgctgatggtgcaggccttccacgccaacatcatcttccccaacaagcaagagcaggagttcaataagctgacggacgacggacacgtgctggactctgagacctacgtcgggggccacgtggaggccctcgagtctggggttttccgcagcgatatcccttgccggtttaggatggtgtgcttcttccctgggattcagattcttcccrctcttgtgctgtggtaggacccagaagctgcaggggctgwaataaagccccttctccccatcctgtcccacggcccctcaccgggtgtggcttctctggcccagcaccccccgggggcttctttagggcagtgcactgcagattgtgcacrtgagtccttcyggagctttctcgggcacaacctgccacgtgcagccacagcgtcaaacctgaggcaggctagtgtgggtgtgtttcccctctgaccccgtcgtctcactgttgtgctagaatcctgccgcctttgacttcctgctgcagcgggttgagaagaccttgcgccacgcccttgaggaagaggagaaagtgcctgtggagcaagtcaccaactttgaagaggtaaccatcagggaggcaggaagagccagtctgtgtttggcgccttcttcacagaccacgtctttcagcagcacgtttattgtgcacctgctgcgtgtggtgctgtggacggatgacacagggtctctggtgggacagggcagtcatggttgtgacgtgtgatgctgtcacaaggtcggagggcttcatgagaggtggggtgtgagctgctcctgaaatgcagtaacatggaaggtgggtcctggtgggatgtatcccgtgtcctgttttaaagcattaggactttattttataggcactggggagccattggaggttttaaattttatttactttttgttgttgagacttaaaaatgacagtaaattcctacaaatgacaggattagtgactgtaaaatctgtttacataatggttagaaagcacacttacaaagtgtgttatgtgactggagagggagacaccagttcttctctgatccctgttcctcaggacatggcacatctcaggtcttttttttttttttttttttttttccctttttgagatggagtctcgctgttgttggcctgggctggagtgcaatggcatgagyttggctcactgcaacctctgcctcccgggttcaagcaattctcctgcctcaggctccccagtagctgggattacaggcatccgccaccacacctggctagtttttgtatttttagtagagacagggtttcaccatgttgtccagtctgatcttgaactcctgaccttgtgatccgcctgccttggcctcccaaagtgctgggattacaggtgtgaggcaccgcgcctggcctatctcaggtctttatgtcaggcactgtgcagcactacatcatgttcagtgaggttgctggtttagagtttttaacagttttcacattgatgccaagaaactttttttttttttttttttttttgagacggagtcttgctctgtcacccacactggagtgcaatggcatgatctcggcttactgcaacnnnnnnnnnnnnnnnnnnnnnnnnnnnnnnnnnnnnnnnnnnnnnnnnnnnnnnnnnnnnnnnnnnnnnnnnnnnnnnnnnnnnnnnnnnnnnnnnnnnnnnnnnnnnnnnnnnnnnnnnnnnnnnnnnnnnnnnnnnnnnnnnnnnnnnnnnnnnnnnnnnnnnnnnnnnnnnnnnnnnnnnnnnnnnnnnnnnnnnnnnnnnnnnnnnnnnnnnnnnnnnnnnnnnnnnnnnnnnnnnnnnnnnnnnnnnnnnnnnnnnnnnnnnnnnnnnnnnnnnnnnnnnnnnnnnnnnnnnnnnnnnnnnnnnnnnnnnnnnnnnnnnnnnnnnnnnnnnnnnnnnnnnnnnnnnnnnnnnnnnnnnnnnnnnnnnnnnnnnnnnnnnnnnnnnnnnnnnnnnnnnnnnnnnnnnnnnnnnnnnnnnnnnnnnnnnnnnnnnnnnnnnnnnnnnnnnnnnnnnnnnnnnnnnnnnnnnnnnnnnnnnnnnnnnnnnnnnnnnnnnnnnnnnnnnnnnnnnnnnnnnnnnnnnnnnnnnnnnnnnnnnnnnnnnnnnnnnnnnnnnnnnnnnnnnnnnnnnnnnnnnnnnnnnnnnnnnnnnnnnnnnnnnnnnnnnnnnnnnnnnnnnnnnnnnnnnnnnnnnnnnnnnnnnnnnnnnnnnnnnnnnnnnnnnnnnnnnnnnnnnnnnnnnnnnnnnnnnnnnnnnnnnnnnnnnnnnnnnnnnnnnnnnnnnnnnnnnnnnnnnnnnnnnnnnnnnnnnnnnnnnnnnnnnnnnnnnnnnnnnnnnnnnnnnnnnnnnnnnnnnnnnnnnnnnnnnnnnnnnnnnnnnnnnnnnnnnnnnnnnnnnnnnnnnnnnnnnnnnnnnnnnnnnnnnnnnnnnnnnnnnnnnnnnnnnnnnnnnnnnnnnnnnnnnnnnnnnnnnnnnnnnnnnnnnnnnnnnnnnnnnnnnnnnnnnnnnnnnnnnnnnnnnnnnnnnnnnnnnnnnnnnnnnnnnnnnnnnnnnnnnnnnnnnnnnnnnnnnnnnnnnnnnnnnnnnnnnnnnnnnnnnnnnnnnnnnnnnnnnnnnnnnnnnnnnnnnnnnnnnnnnnnnnnnnnnnnnnnnnnnnnnnnnnnnnnnnnnnnnnnnnnnnnnnnnnnnnnnnnnnnnnnnnnnnnnnnnnnnnnnnnnnnnnnnnnnnnnnnnnnnnnnnnnnnnnnnnnnnnnnnnnnnnnnnnnnnnnnnnnnnnnnnnnnnnnnnnnnnnnnnnnnnnnnnnnnnnnnnnnnnnnnnnnnnnnnnnnnnnnnnnnnnnnnnnnnnnnnnnnnnnnnnnnnnnnnnnnnnnnnnnnnnnnnnnnnnnnnnnnnnncctgcctcagcttcctgagtagctgggataacaggcgcttgccaccacgcctgggtaattttttttttgtatttttagtagagacagggtttctccatgttggccaggctggtctcgaactcccgacctcagctgatctgcccgcttggcctcccaaagtgctgggattacaggcgtgagccaccgcgcccgacctagaagcagatatttaaagtctttaagaaacagatgggcaggtagagtgaggctggaggtgtggtagatgtgaggatgccaggctccctggtgagtgaggaagagagctctgtagatgtgaggacgccrggctccctggtgagtgaggaagggagctctgtagatgacattgtcctgttagcgattcctaagtcctcgcaagtrcccttgaaagggaagcccaggatcgcctttgtgtccctgaagggtcacctgttgggcggagggtggctggggggatgtcagcaggggctcacagccacgtggggcatgtccaggtggtgtccccaccatggaaacttggccattcacttgtcccagcccatcctccccttcttgactggacagcctttcagaacacgccgttactgggcagagaagggtgcagtggaggctcttccccggctgattcgtttatctgtaattcaagtagaaacaataggtgttactgttgtggtatttcctgttctatggaatagatgttattccttgtaatcacttttttcttaaaattttaggtgtgttttctatttttactactttggagggttttaaggatttttctttttctttttttttttctgaaacaggatctggctctgttgcccaggctggagtgcagtggtgcaatctgggctcactacagccttgacctcacgggctcaagcgattcttccaccccagcgttccgagtagctgggactacaggtgccaccgccacacacggctaattttttattttttatagagacgggggtcccactgtgttgctcaggctggtctcgaactcctgggctcaagtgatcctctggcctcggtctccgaaagtgctaggattacaagcatgaaccactgcacctggcctaaggattttttttaatactaaggagagtttagtgttcaagtaattttctaatgactccaccaaatttaatgtatttcatagaaatgatggcaacccttcttaacttttttcttctggctagtttttgctctatttatatatttttcagctttttcctctcctgaatgtctaaaaggggttggtgaactgcacacgaggcaagcttggtcaccagcctctaytgagtttcgctttctctgcaggtgtgtgatgagattaagagcaagcttgcctccctgaaggacgttcccagccgcatcgagtgtccactcatctaccacctggacgtgggggccatgtaccccaacatcatcctgaccaaccgcctgcaggtgagactttacttcccgtgtcagagtcggagctctctctgcccagccctaagtgctttctcacccctcccagccctctgccatggtggacgaagccacctgtgctgcctgtgacttcaataagcctggagcaaactgccagcggaagatggcctggcagtggaggggcgagttcagtgagtgtcggccgcctgggtgggcactcggtgggaaacgggtgggtgagtgtcggccgcctttctccactyggtgggaagccggtgtgtctgtgcctccttttgaacttgcccccattgcctccttcccagtgccagccagtcgcagcgaataccatcggatccagcaccagctggagtcagagaagwtcccccscttgttcccagaggggccagctcgggcctttcatgaactgtcccgcgaggaacaggcgaaatacgagaagagaaggctggygggtgagtgcctgggcatggtcacggctgtaaagatgtggctcctgctcccactttctgttcttactgggctgcgttggtccatcccagctggggccccagaggtgttgtcacagcagaccagaagctgctctaggtcactgtaagctgtgctctcactgcagggtcctttatttgcttccccatctgcaagtgttagacactgctgctctgtggtcttggggtatttggcctgttcctacccctgggctgtcctatttctttcttttttttttgaaatgaggtctcactctgtcacccaggctggaatgcagtggtgtgatcttggctcactgcagcctcaacctcccaggcaccggcaatcctcccatctcagcctcctaagtagctgggactacaggtgtgcgccaccatgcctagctaattttttgtattttttgtagagatggggtcttgccatgttgcctaggctggtctcaaactcctgggctcaagtgatccgcctgcctcggcctcccaaagtgctgggattacaggtgtgagccaccgtgcccgcccacctttttcggtatgagaaactagcagtgtatctgagctgttgctcctttgtggtgacgtagaagccatgttcttcagcacccctgtgccctggctccctctgctctgggagatctcacccacctgctctgcccatctccgtcrtgcttagattactgccggaaagcctacaagaagatccacatcaccaaggtggaagagcgtctcaccaccatctgccagcgggaaaactccttctacgtggacaccgtgcgtgccttccgggacaggcgttacgagttcaaagggctccacaaggtgagctctgaggggctgcaagctttggcctctgtgagggcagtttcagtcggctcatgaagtgggcactcttggctccttgcctgggatcctctgagcaggcacttgcactcggatggtaacgtgcaattgtttttgacttggaagagttgatggccacgaaggatgcagaccatcatccaccctggtctgaggcctcagaaggaccctaaaggatgatttctaaagtgattatttagagcaggggtcagcaagctacagctggctggccrtttgagtacatcaagttttacgaacccawctgccttcgcctattgtttatctctttcccgctgtcatgggaggtgaggagttcctagaaactctaaggccttctcatctatggtattcaccatccggcccctcgtgtttaactgacgtatttcatccggtaggaacrtggaaaatgcatagcaacacctctgttttgataccaacgggtcattattttatatctgatcagattgagccattttttttctgagagaccttcactgtagactcagcacggcccctgctgtgcggccccctggcatcctgcactgccctgctgaactcatcgtcacatgttcttttttataatggtaaggcggacataatatgacatttagtgtttttaagtgctcagttcaggggcatgaagcatattcgcactgttgtgcaactatcaccaccatctacctccagaattcttcgccttctcaaacggaaactcttatctccatcaaacagtagctccccacctcctccctggcccctagcgacccccattccactttctctctctgaattccacgactctagggatgtcatgtaagtgaaccatgcagtatttgtatctttgtgaccggctttttcacttagcatgatgctttcttttttggagacggggtctcactctgtcaccaaggttggagcacagtggtgtgaccttggctcactgcagcctccacctcccaggctcaagtgatcctcccgcctcagcctccccagttcctgggaccacaggcgtaccatcacgcctgatcgttgtatgtttggtagagacggggtttcaccatgttgcccaggctggtctcaaagtcctgaactcaggtcatctatccaccccagcctcccacagggctgggattacaggcgtgagccaccgcgcccagtcttagtatgatgttttcaaggtttatcaacatacagcgtgtatctgtactgtatttttgtaaatggctgaataatatttcattgtgtggatttgtcayattttgtctatccttcatacaccgacgtgcacttgggttgcttccaccttttggctgtcgckagcaatcctggtttcaacatgggctgcaagtgcgtcttcaggtctctgcttttggtgattttggatatgtacccagcagtagagttgttgggtcatatgctaattctacatttaccttttaaggagctgccttactatctcactttattttaattaagcaactgctaaattacttgttcatctgtctccctcatcaaataagcaccaaaagtgtagtgactgtctcgtgcttcagagtacaatggagttcctggcacatactaggcactcagtaattatcttaaggaatttgcttttgttccttaaatacccagcctttaaaaaccttttctcatgttgggtggggaatttgatgagacatctgtggtcttagctgcatttcttgattgattttaccaggcacccccgagtagctcttgttccctagaaactgtgctgaagcgtttaggatgtcagaccgtgaaatctacaatgttcaaatgattctgtcaacacagagagacagaataaaggaagtgtgacaaaatattgacagttggccagtctaggagaagaatgtacactcttcattgtactggtttttyaggttttcyatagatttgaaaattttcaaaatactaaaaacctgggctattgactttgtagaatgtgaaatggaagaatctgtgmggtgytccatgttcrtgtgcttctcaggtgtggaaaaagaagctctcggcggccgtggaggtgggcgacgcggctgaggtgaagcgctgcaagaacatggaggtgctgtatgactcgctgcagctggcccacaagtgcatcctgaactccttctatggctatgtcatgcgcaaggggtaggtgggcccgggcccgggagaggcttatgggaggaatggatgagtccacgtttagggcagcttcaggtgtaggctgctgtgcatggagggccgttcatctgattcaaggaatgttggagggagaaggctttgggctggggtggggctgggaggttgaagagagtgggggccacgctgactttgagggtctgggtgtccatgagtgatgcgtgctgtggggtgtatgtgtctctgcatcatgggctggagacacgacttgccattttccagcgcgttcatgtctcccagcgtggatcctcactcagggacttgcagagtgtcgggcagttgcttcacagcatgtctgcgtgtccgggaggggcagagaagcaactgacaaggggcatggggctggtgccgggaggggagggtgggacagctgacagcagggctgggacccaggctggaggagggttgggcctggcagctaggcctgggctttctctgagaagctggaggtgagaatggggcttgggaggaggtgtgaagagagtagagaaggcgtgaatgggtctgggtggtattaagagtcctgctgaggctggagtcctgaacggctggacgcagtggcacatactgcacccttccagatccttcctgggcaccaaggtggggacagagaggtgtcctcgggcagagccagattccaccttagttctgtcctggtgcacgcacatttggctgcttcccttgtccctgtckcatctctcctttcctcctccctactcctcactgcctctgataccccctggaggagccatgccagccccacccaccagtttrtggtgtcctctcagggctcgctggtactccatggagatggctggcatcgtctgcttcacaggggccaacatcatcacccaggcacgggagctgatygagcagattgggtgagtgcagaaggggagccgtggggctgggagcaggtcctgggggcaagcatgggcaggaaggaaggagggaaggctggaggccacacactgggcaggaaggaaggagggaaggctggaggccacacactgggcaggaaggaaggagggaaggctggaggccacacactgggygaaaaggaaaggggaactcacgaccttgctcctctctttctctgaaggaggcccttagagctggacacagatggtatatggtgcgtcctgcccaacagcttcccagaaaattttgtcttcaagacgaccaatgtgaagaagcccaaagtgaccatctcctacccaggcgccatgttgaacatcatggtcaaggtgagtctggggcctctggtcctgaagctctggctggcctggcgtcagtgccctgatgtcactggctctgcagcacctcacagtgtgcatgccttcctggcacccagcactgctcacattgcttttctatagcctgaagaccatggtcagaggtatcaagtgattccactcctttctctttcagcatagctcccagaattttttgcttttaactttttattttgaaataattttaaacttacaggaaattacaaaaatagtacagagaatttctgtatccccttcaacctgccttcccctaatgctgacctcgcataaaccatggtgcgcttgtcaaaactaagaaacctatgtctgtgccccagtaactgcactgcaggcctcacctggatttcccatttcccaccayagcccctcttctctcccaggatcccagcaaggacccacgtggcgccgagttgtcctgtcccggtctgtcctcgtgtcacgacctccccctctggtggtgccggccaggcgatggttggctgtcccttgatcaggggttgtctgttgtttctcgtgactagactgaggtgatttgggtttttggaggagctccacaggtgcgacaccctccccacgttctcacacgcatcgtgttggtttgtggtggtgtgggagtgtgggtgtgttgtggggacggcttagtctcctgcctgaggggcttctgcaggccttactgtggcgctcctgtgccccctccyatacggctcttcagtcgtaaatacacacccagtggggaggatataagcgtccctggaggagggctgtcagagtttctggacctgtattagagccatcacagcagcaaatagatatcgtggagcaggtgcttcgagacagtgtatccacagctgctccataagcttctgcccactgtgttagcgttgctgatgggctgtgtttgctggtgggccgcacctgcagcagttacgcctgaggtttcctgtcgtggtttttctctggcgattgtctgtttccttcattccttctactgtatcaattgggatcctgtagggaagcgttgctatccttctcttccatttgttctcgtttatttgtctgcttattgacatcagtgtggatttgcggatcagagtggacatcccagggttattgttcataggaccggagtggcttcctgctccacgtgttccccttgggccactggggcctcctagtttgtggcgtgttcttgggacacgccctcttctggtctttgtttctggagcactttcctacttcttggtactgtaaggtccaccagcctcatcttgtattttccctgctccaacctggagtcagccagttctccgagaagaatgatgtaaaaacccgagatggggtgcttgctgtgctcactgttcctgggagtgtcatagcttccagtctctcatagtggaggcagccaggaagtatgtctctagtaacgcacgcacacagaactgtttatttctgtgtctgtctgtctgcatggatgcatttaaacacatgagtctgcccctttcttattagtgacttctttctccttcagtgataaacctgtttcgaatttctcaatatatgtgtttgttcaatcctagagtccatgtaaagtagttttagaattgctaacagacttgtgtcccatgagaaataatttcaccagccactgtacagcatttgtagatagttacttttgttttcagccttaccctgtccagtcagcagagttcacgggcagctccttcctccccaccctgttggcatgttctgctgtatgtccacagtgctgttgggctcatttggcccagtctgcacccctcttgggatcccagcaccatggctggatggcttgtaatttgcacacagtgacgttcactctgtagygtacagccctgtgggtttggacaagtgcatagtgtgtgtgtccagcaccacgaagcaacacaaaacagctgcaacccctttgtcagcaaatcctctccctaccccgaaaccctggcaacccacaatgtgttttttgtactataattttgctttgtcgaaaatgtcatgtaaagggaagcatacggcctgtagcattttgggtctggcttcttggacctaacagatacacctgagtttcaccacttggttgcatgcatcagaacttccttccttcctgctgccaagtcgtgttagttatgtggaaaagcctcggtttgtcaatccatccactcctggagggacaccaggtggtttccaggtttgggccatcatgagtgaagctgccccctcttcactcttgtttctcaggaaggcttcaccaatgaccagtaccaggagctggctgagccgtcctcactcacctacgtcacccgctcagagaacagcatcttttttgaggttgatgggccctaccttgccatgattcttccagcctccaaggaagaaggcaagaaattgaagaagaggtgggactctcatagcttttgtgctttagaaaggacrtggattgagatagattaaatttagcccagaaaggaggttggatcaggagccaggatagaaacagacctgggttcttgtgatcttactgattccgtttgcaccagctctgtctgcccgcctgctgtattctggctctgtggctgcaggcccttcagccattttccttttagagaagcagtggcctaagggagagagacgtttgctgcctcgtggatgacaggtggagggttggaaagggaagaggcgggcagagaggatgaggcacagctggtggctccccagcgctccttgccactgctgtgcttgccttttttttttttttcaggtatgctgtgttcaatgaagacggttctctggctgagctcaagggctttgaggtcaaacgccgyggggaactgcagctgattaagatcttccaatcctcggtgtttgaggccttcctcaagggcagcacgctggaagaggtgtatggctctgtagccaaggtggctgactactggctggacgtgctgtacagcaaggtaaaggcctaccctccaccctcacctgctctgagggatgaaggatgaagcaagaaggggaccccgtgcttcctgggctcctggagaccaaggtgaccgaagaacacagggccagtcctaatgaaatcccaagacctcctgagcacaattacccccttggagttcccctcaacttctgcatccagggacacaactctgagggaaacgtttttctaaatagcgtgataagcctggcatggtgatgcgtgcctgtggtcccagctacttgggaggatcacttgagaccaggaagtagaggccacagtgagccgtgactgcaccactgcactccagcctgggatatttgtttatttctatgttactttgtattttttatatttttcaggctacataacattttgacagtttacataccttaatttacgtaactagcccacgattatttactaccagataggtttcacatttccattgttatcaatggtgttgcattgaacgagatatctcggtgcatatgtttcccaggcacaggcgtcttgggtagaaggaatactggaacactctgcagtgctttcctggcttgctttgctgtgtgggcttctgtttcttggcatattgtcttgtatagagtgaaacacacgagcaagggagcaccagggtatcacacagaatattcatgagcccagcactccttacaggatgtggggggcctgtggtcaggaacatgtgtgcaaagcacagctccagctggatgtgggtgccacactggaactgctcaggcctccactgctcaggccactctccagccrgccggagtttctctttcctctcttctggctcttcctgccccttctttctcttcctttcaaggagaaaaacttcctgtcttaggccgagcaacatccttttctgcagccttggtgctcttcagtaaattcttcttgatattttgtgcacagtttaataaaataaaagccaagccaggcgtggtggctcacgcctgtaatcccagcacttgggaggcctcggcgggcagaccacttgaggtcaggagttggaaaccagcctggccaacatggcaaaaccctttctctactaaaaatacaaaaattagctggatgtgatggcaygtgcctgtaatctcagctacttgggaggctgaggcacgagaatctcttgaacccaggaggggaggttttagtgagttgagattgcaccactgcactccagcctgggtgacagaatgagactctgtctcaaaaaaaatataaaagctaaagttttgtgtgtgtgtgtatgttttaaagtattgccacacaggcatattagagagctcttgaaattgcagccttctgcgtctcaggctagagaagggcatggcctagaggagcacagtccagggtgagctcagactctgccccttgatttctgcagtgttttacccattgtctttctctaggcagccaacatgcctgactctgagctattcgagctcatctctgagaaccgttccatgtctcggaarctggaagattacggggagcagaagtctacrtccatcagcacagcaaagcgcctggccgagttcctgggagaccagatggtcaaggatgcagggctgagttgccgctacatcatctcccgcaagcccgagggctcccctgtcacggagaggtgagggctccccccatcacggagaggtgagggctcctcccatcacggacaggtgagggctccctccgtcacggagaggtgagggctccccycatcacagagaggtgagggctgccctgtcacggagaggtaaggggttccttacagatttgggctgtgtttaacaccaagtttggggatggcataagtgtccatcaaccagaaatggataattgccattttgtagggaatgagatacactataccagagttcaaagggttgaattgcagctacaggttacaacactgacagtttgaaaccacgttggagaaaaaagcaaaaatcaggttgaaggaagacccttatgcctccgtgtatgtaaaacttaaaaacatggaaactgctctttttttttttattttttttttnnnnnnnnnnnnnnnnnnnnnnnnnnnnnnnnnnnnnnnngtggttatatacaaataggaccgtacaaatgcctgcatggggttgatgaacaccagtaataagggttgtctttacttctgtgtgaggagggaataggttggggtcacacagggcttcactctaatcgtctcacacaggaagtcagagtggccaagtgttgaagcttgatggagccgagtggatcatagtgtgcgtgtcttctttaggtctccttatgtttgcagtattcaccacagatgtttcctccagtgaaagggaagcactgacggttgccagttgctttgctagtgacatgaaaacaggctcgttctttctagaaagcagcctgagtcttctgtgtgttactcagcaaggaacatgtagacatggttatgaacgtgcacgtttgcctgtatgcatgcacgtggttactcagaaacgcagacatgtttacgcacacacgcatgtctttgcctatacgcatgcgcgtggttactcagaaacgtagacatgtttacgcacgcatgcgtttatgtatgtgcatgcacatggttatgccgtgagaaacatgtagacatagttacgaacatgcacgtgtttgcctgtacgcatgcacgtggttactcaatgagaaacgcagacatgtctacgcacacgcatgtgtttatgtatatgcatgcccatggttacgctgtgaggaacatgtagacatgtttacgtgcacacacgcacgtgtttacacatacacacgcacgtgttactccccgaggaacctgtaggcatgtttgtgcatacatatgcacgcagatgtatacattgatgtttgtgaacagctgttacacgtccttatttccatgttcatttgataagagttaggatcagattttgggtgattttcactgttactgagctgtgtgcctgtcttccttacccagggccatcccacttgccattttccaagcagagcccacggtgaggaagcactttctccggaaatggctcaagagctcttcccttcaagactttgatattcgagcagtgagtgccagttgcgttctctactcttaaaagtttacaaggaaagctagacagagcagaatgtctgagttggattatgttttttgtctggcgtcttcactcttgacttcctcctttctgataagtaataggtgagcacctaataaccttttagggcaaaactgaaaacatgaagtgcctggggccctttagctgttctattggatggactaaggccaggggtgttggctcagccacctactagctctgtgatctagaggagtcagtgaagctccctgccttggtgtcctctgttgtgcaatgggcacctttcatcatagagtttctgagaggattaaataagacacagtggttagccctgtgctcagcatgaagtgagccccactcttggctgctgccacctgctgttctctgtgcccgtttcctgcacatgcagattctggattgggactactacattgagcggctgggaagcgccatccagaagatcatcaccatccctgcggccctgcagcaggtaagggcggggtcagtggcacgggctgtggggctaaaaactgtgcagttagacaagggtctctctctgatgggtgttggcctcacacaggtaaagaacccagtgccacgtgtcaaacaccccgactggctgcacaaaaaactgctggagaagaatgatgtctacaagcagaagaagatcagtgagctcttcaccctggagggcaggagacaggtgacggtggggccccgaggctgggctgggcgggatccttgtgacacacaggactccaggcttcttgcgctgctgtgtgtgctgtagtgaagcttctgttcaagcatcgaaaatggactttttctgaaaatgtgcccattggcactttactctctaactctgagtgtcactcttttgttaataggacaccattgtgaggctgaggtgagggcaaggaactgtctccttatgtgaaaatattagggtgcactacttagactcagtgccttgggcaaatcactgtctcttgaagccccagttttctgaatgtgaaatgaatatcttccctatggaaacacttagaaacacaggacacagtgtaataaaaggtacagtgaaagtcagaagagcaaaaggaaaattcttaaatgctgaaaattaaaagtaagctataaatcagagcagtatacaaactcacatgacaagaacaaggttctttgaccaggtgcggtggctcacacctgtaatcccagcactttgggaggcctaggtgggcagaccacaaggtcaggannnnnnnnnnnnnnnnnnnnnnnnnnnnnnnnnnnnnnnnnnnnnnnnnnnnnnnnnnnnnnnnnnnnnnnnnnnnnnnnnnnnnnnnnnnnnnnnnnnnnnnnnnnnnnnnnnnnnnnnnnnnnnnnnnnnnnnnnnnnnnnnnnnnnnnnnnnnnnnnnnnnnnnnnnnnnnnnnnnnnnnnnnnnnnnnnnnnnnnnnnnnnnnnnnnnnnnnnnnnnnnnnnnnnnnnnnnnnnnnnnnnnnnnnnnnnnnnnnnnnnnnnnnnnnnnnnnnnnnnnnnnnnnnnnnnnnnnnnnnnnnnnnnnnnnnnnnnnnnnnnnnnnnnnnnnnnnnnnnnnnnnnnnnnnnnnnnnnnnnnnnnnnnnnnnnnnnnnnnnnnnnnnnnnnnnnnnnnnnnnnnnnnnnnnnnnnnnnnnnnnnnnnnnnnnnnnnnnnnnnnnnnnnnnnnnnnnnnnnnnnnnnnnnnnnnnnnnnnnnnnncttctgcctcctgggtttaagcagttctcctgcctcagcctctagtgtagctgggattataggcacacaccaccatgcctagctaatttttatttttttaatttttttctgcctcagcctctagtgtagctgggattataggcacgcaccaccatgcctagctaatttttatttttttaatttttttttttaatttttagtagagacggggtttcaccatgttggccaggctggtctcaaactcctgacctcaggtgaatgcacccgccttggcctcgcaaagtgctggaaatacagcacwgcgcccagtggcttatgggccagtataacaatttcaagagttatattgaaaagataggacgcaggaaaagcaaaaggastaaaaaatacgtataccaggtaaatgttaaccaaaagaaagctgatgtggctgtattaataccagacaaaatactctttaggccaaaagtattaggaaacataaggactattgttacataatactgaaagtcacaattctctggaaatatatactaattgtaacaatgtagcctcacattaaataatgtaaacatttacctaattataagaagaatttacctccaatcagtttgggagatgttaacatccctccctcaattgatagttggagcagaccaaaaatcagcaaaaatatgtttggaatgacacaatcaactaactagatttagtcactagctataatacatttagtgaacaaatgtagtcttgcactaaaattagagaatacctatccttttcaagaatacataaaataatgaccatatatataccacagagtaagctgcaaccaattctagataacttaaatacagaccatgtttggaaatttaagaaaaaaaaaacacatttataacttgtggatcaaaaaagtcatagaacttagacaatacttggaactgaatgtaaatacaaatgctattaaaatttgtagtatgcagttaaacaggacttgtatacgcatttatatatctaaatgcatgtattagtaaagaaaaacaaatagaaaattaagtttccaactgaaaaagttagagaacaacagatccatcagaggaagtagacagaagttataaagagttataaaggtaaccaggcatggtggtgcacacctatagtcctagctactcggaaggctgagaggcaggaggattgcttgagcccaggaatttgaggttgtagtgggctatgatggcacctgtgaataggcacttcaccccagcctgggcaacacagggagaacccaactcaagaaagaaaagaaagaggttacaaaattgagccagaatgagtgaaacaaacaatacaaccaaaatgttgttctttgaaaagacttaggaaaatagtcacatctttttcttttcttttgagacagggtctcattgtgtcacccaggctggagtacagtggcgcagtcatggctcactgcagccttgacctcccaggctcaattgatccacctgcctcagcctcctgcatagctgggactataggcgcacaccaccacatccagctaatttttgtaattttttgtagagacaaggttttgtcatgttgtcctggctggtcacatctttttcaggacagagttttttattttaatgaaaacagacatcattatagatatagtaaagcctaaaaaaatggaaggattcccattttctgctaaacagttggaaaacatagatggaacggacagtatcctcaagttatgcactgacctaagaagtaataaaaacctgaatagaactttaaccattacagaaattgacacttaaaaagaaacaggccaggcgcagtggctcacacctgtaatcccagctctcagggaggcagaggcgggaggatagcttgagcccaggagttcgagacctgcctgggcaatatagcgagaccccgttctccacaaaaagaaaaaaaaaagagacgaaaaaaataagtgtaaaagaaacatcaaacccaaatgatttttaagagaaaaaggaaaaaaaaaacccttagctcatttggtaaccttggcaatccttgttactttggtaacataattgaaaacaggaaaggaaagttacgggccatgaacaatagatgaaaaaatatcaacatacatgaacaataacaatatgaccaactaggacttatgctgggaatagcaagcactgtttaattttagaatttgccaggttagtttttcttgggagaaatccactaattcatcattaaaggagaaggctcgtaagatcatctccaatagatgcagaaacaacatgcggtaaaactttaacatctgctcatgataaagctttgaacaatcaaaatcagaatagatgagatgtttcttaacctgataaagtgttcttgaaacctaacagcagacctcatacttaaccacaaaacactggaagcattgaagtaaggagtaagaaatggatgcctgttaaccactgcttctgttcaaaacagtttggagatcctagccagcataattaaaccagaaaaagaattaaggattgaaaagggagacatcaacttattatttacagrcgatgtaatttgttaacagaaaatgtaaggaaacctagattttgtgttaacttatatgtatttcagcaacaattagataccaaggtaagatataaaagtctattgctttcatttatactagaaacaaaatattttttgaaagataccatttacaatagcaataaataatgtactaaggaataaattcatggtaacaatgtgtgtaagacttttacagaaaaaattacacaacttttttctttttgagacatggtcttcctttgtcacccaggctagagtgcggtggcaagatcatggctccctacagcctagaactcttaatctcacgttatcctcccacctcagcctcctgagtagctgagactgcaagtgtgcaccaccacacctggctatgtattttttgtagaggctgggtctcactgttgcccaggctgatcttaaactcttgggctcaagtgatcctcctgcctgggccccccccaaagcactgggattacaggtgtgagccaccatgcctggcctatacacaactttattgaacatataaaaatttacctaagtaacaaaaagaggtaccatctttacagatgaaaggactcagtattaaaatatggcagtttgccccatattaattcataaaattcagtgtaattccaataaaaaagaatctgccaaaagctttttggatagaacttgacagacgaatcctaaaattcatataaagggtaaggataagaataaccaaagaattttgaagaataaggagggcacgttgatcttactatgtaacgagacacactatcatggcatcttgacaagatgagaggagagcagtagagccgattgggagcctagaaacagactcccctgtwagtcggaagttggtaggtcacagatcgttaaggagagagtggactgcagtgagtgatgctggtgaaaatggtttttcatatttggagaagtaagttgttgtatcacactgagtgtgaaactaaggctgagtgtgatggctcatgcctgtaattgcagtgctttgggagtccaaggaaggaggatcagttgagcccagaagttccagacgagcctgggcaacatagggaggtctcgtctnnnnnnnnnnnnnnnnnnnnnnnnnnnnnnnnnnnnnnnnnnnnnnnnnnnnnnnnnnnnnnnnnnnnnnnnnnnnnnnnnnnncatggttgtgcatgcctgtagtcccagctacttgggaggctgaggtgggaggatcacttgagcctgggaggttgaggctgcggtgagccaagatgaccactgcactccagcctaggtgacagagcgagacccctgtgtctttaaaaaaaaaaaaaaaaaaaaaggaaactacaatctttggtaaacaactcaggagactatgatgctggggtgggaagggcttttttaaggcacatgtgaaaaacatcacaaagggaaagaatgatcaattaattaaaagttaaatcttgtgtagtctgtwacaagaaaggcagaatgttgataattgttgacactggtgataagaacatgggagctcattactgtgctttcgtgtatgtttgaaaactttcctgataggaagtcaacacacacaaacttacatgtagcacagaagtcaccatgaaacaaaggcctgagtcacattttgaagatgtttagaatgtataaaagttagaaatggctcataaacgtgttagctatctattgctgcatagcaagtaaccccaaaacttagcaacttaaatgcactcgtgtatccgagggctccactggagaaggagccacttccaagctccctcccatggggatggcaggactcggttcctccttggcctttgtctggacgttatccttagtcccctgctccatggggctcttcacaggacagctcacagcatggcactggacttttgagagagtgccagccaggcagaagccacagtgttttatagctgctctcaggagtggcattccatgacttttgctggaatctgttcattacgggcaagtcaccgggtcccacccccactcagggaaggagtcacacagggtgtgaacaccaggaagtgggggtcgttgggccattttgggagctgcctgcacagggccaagatgttcagccttagtgttgatgaggtaaatgcagcatgatgtatttagatagcaggtcacactgaaggcaagtaagtgtggtggcatcaagtagcaagattgtgggaagtaggaaatccctggtgctagaggtggaggtggttgttctccgggaccaggcaacacatacagagatggtcattgagtcacagtttgtagttttgaaaaagtaggcgcttgtcattcttcatttgcaaagtcatgggtaggtaggctgatgtgtttatatgataaatcatttcacatcagttacaatgaacgaacaatatgtgcatgtttcacccggtgtcagtctcaaaaatacatggctgaataaagaaacaagttgcagggacaggcatgtggctcacgcctgtaatctcaacactttggaaggctgaggtgggtggatcacttgaggtcaggagttcgagaccagcctggccaacatggtgaaaccccatctttactaaaaatacaacaaaaaattagccgggcttggtggcaggtgcctgtaatcctagcttcttgggaggctgaggcagaattgcttgaacccaggaggcgaggttgcagtgagatgagatcgtgccattgcgctccagcctggacaacagagtgagattctgtctcaaaaaaaaaaaaaaaaaaaaaaaaaggaaacaagttgcagtcagatgtgtcccacatgttactatttaggttaaaacttacagctgtggcatgtgtctgtggacatgtggtaaaaatttaaaggtgtgtgggggcagacagaagagggctgtacccattatttgcaatattttctttcttacaaaaagcattctggagcaaacatggcaaaatgcaaagatttacttattggtggtattgagtgacgttttatttttcggtttgatcttttcactttttttttgaaagagggtctcaccctctcgcccaggctggaatgcagtggcgcaaccttggctcactgcaacccctacctcctaggctcaagtgatccttccacctcagcctcccaagtagctgggaccacaggcccacacaaccacacccagctaatttttctattttttgtagagacggagtttcaccatgttggccaggctagtctcaaactcctgggctcaagtgatccgcccacctcagcctctcaaagtgctgggatgacaggcgtgagccaccacacccggccttcactattaaaagttcaataaacttgtgtaaacgaacatcccatttcaggtgatatacttatactagatttcgagaagtagaatttgtggggatgagatcctgagattttttgtttgcttgtttttatgaggcaaggtctcacttgcccaggctggagttcagtggtgtgatcatagttcgccgcagcctccaactcctgggttcaagtgatcctcctgcctcagcctaccaagtagcttgggactacaggcgcactaccacgcctggctaatttgtaatatattttgtagagacagggtcttgctgttacccaggctggtctcaaactcctggccccaagcaattctcctgtcttggcctcccaaagtgctggcattccaggcatgagccaccctgcgcagcccgagatcctgagatttaaggcttcactgggtctttccaggtcacgatggccgaggcctcagaagacagtccgaggccaagtgctcctgacatggaggacttcggcctcgtaaagctgcctcacccagcagcccctgtcactgtgaagaggaagcgagttctttgggagagccagraggagtcccaggacctcacgccgactgtgccctggcaggaaatcttggggcagcctcccgccctgggaaccagccaggtaaggcacacagctgtgatactgtctgtctctgaggggtctgcacagcccagggagcccgagatgygtcctgacccctagggaggctgcttgtgagaaagtcrtggcgggcattcccatctcaccacttgcacactggctgtgctcaccatccatcccaggaggaatggcttgtctggctccggttccacaagaagaagtggcagctgcaggcccggcagcgcctcgcccgcaggaagaggcagcgtctggagtcggcagagggtgtgctcaggcccggggccatccgggatggtcctgccacggggctggggagcttcttgcgaagaactgcccgcagcatcctggaccttccgtggcagattgtgcaggtatagaccttgatccaaggggagggcagtggctctgctgatggcccagggagggggtgtccagctgggccctgaggtctgggatgggagggttagagtgggcctggagtttcctgcccatcgtagggaggcctaaggccctgtgctgggagctgcaagctacctggaaggtggcccygtctgtgggttccagtgtgtcctgtgatgtgctgtatgtccgtgtggcctttcagatcagcgagaccagccaggccggcctgttcaggctgtgggcgctcgttggcagtgacttgcactgcatcaggctgagcatcccccgtgtgttctacgtgaaccagcgagtcgctaaagcggaggagggtgcttcgtatcgcaaggtagggaggagctggtgctgcctctgcagtcatctgggcagcctgaggtggctttcccatgatctagcatggcctccagcctccatctcctcagtaccttatgggggatgttctaggaattcctcaaaacaacgtgtgtgagcgctgagcaccgagcctggggcagagcgagtgccgggaatggagctgctggtgtccttgtcacgatgagcttgtctgcccgcgaggtccatgttgcggggacaaaccaagtggcattggttagagattgtgaactctgtctccgtaggctctttggttgttaacagctttattgggatgtaaagttacgccatccaactcacccatttaaagtgcagaattcaatgacttttagtggcatgactattgccagtcaatagtgacattttctttttttttcttttttttaattttactttgatttctgggatccatgtgcagaaagtgcaggtttgttacataagtaagcacatgccatggtggtttgctgcacccatcaccccgtcacctgggcattaggccccacatgcattagctgtttatcctgatattccccctcccctcacccccccattcggatattttcatcactccaaaaagaaacctggcatcccttacctgtcaccatcctcccccagccctcagtagccactgatccacttcctgtctctgggtttgcctgtttgggcatttgatgtaaatggaaccctacagtaggtgggtctttgtgctgggcttcttccacctgcagaaactgcgagggttttcatgtggccatgagtgcgctgaggctcttagatggcatctccacccgaactccccgttgttaatgtgtcggctcagcacatttcttgactggatgctgtgaatcacgtaagaagtgacacgtagttggggagatgaggtgtgcatatttgtacctacacaaggaggttttctggagaaggtgaaactcgattccagccaggtgattcagtagaatgtgcatatagaaagtagacgcagagccaggtgtggtggttcacacctgtaatccccgcactttgggagaccgaggtgggcggataacaagaggaaagcggacacagaggcatcgagaccgcagagaacaggtgggactgtggggtttctacaccttcctttcgatgcgtggtgctgtggtgctgtggccgtgtggaagtgccctaacttttgggatgtttccctttatgactatcagctcatctcgagggaggttctggcgctgtgtgaatattctgtcctcaacgtttgactggatggtgtcagcatccatgtctcgtggggtccatggggctccaggatgatatcttcagattctgttcctctgtgtgtattagctgtttcctttataacgaagagctttgtgcagatcaggtagaaatgaactctattccttaaaaagcaagatacgagagggataatacgctttttttttttttaagcaagataaatgctttttccctttaaattatttttaattttcaaggtagggcatggcaaaatgggtttattcctttcatttttcctctctttttaaagtattactatggattagaggatttttgtttaacttttttgtttctgtttttgagaaggtctctcactccatcacccaggctggagtgcagtggcatgatcttgcctcactgcagccttgtactcttgggctcaagcaatcctcctgcctcagtgtttaatgttttaacatcaaccgtagccaaatcccgcccaacacacacacgttaggtatgttaaggtacacggtaggccctcactttatgttgttgakaggtccttagaaactgcaattttaagtgaaatgactaagtaaaatgatgtataatgaaacagattttttttcttctcagaaactataatgaaactgtgttggccaggcgcagtgctgcatatctgtaatcccagcaatttgggaggctgaggctggtggattgcttgagctcaggcattcgagaccagcctgggcaacgtggcaaaaccccttctctacagagtatttttttaatttatttatttttatttgtttgtttgtttgttttgagatggagtttctctcctgttgcccaggctggagtccagtggcgcatctcggctcaccgcaacctccgcctcccgggttcaagaaattctcctgcctcagcctcccaagtagctgggattacaggcacgcaccaccacgcccggctaattttgtattttttagtagagatggggtttctctgtgttggttaggctggtctcgaactcctgacctcaggtaatccatccacctcggcctcccaaagtgctgggattacaggttgaaccatggcgcccggccccagaatttttttttttttttttaaaggaagaaagaatgttgaacaaaatgatgttatttgaggacctgctatacattacttcacttaaccatcacagtttccaggaatccattgatgttaagtgaggacttactgtaatttacatatagttaagtgcagatttttaaatgtgcagttgattgggtttttggacacatgactatgcctgtgtcacccacacccccacccaggtgcagaacgtttccatcacccgggagggtgctcttgtccccgtgtgcaaccttctgctggcctgatttctgtatttctgtaactgtgtgcatgtgactttctagaacttcatattaatggaaccagacagtagactctttggtggtcaatatctttttgagactcaaattatcccaaattgggctggccagatcccttcaagctggcacctgagtccttttgacatgccctgttggtctttgaaaacttccttgctttctggccactaagagaggccaggctcaccttgaacttccagacgtggaattagctgttcctctaaagagcctgagcctcgttgagaggttatgttgagaaaccaagcttagagctcaaggggtatcatttcatctagattccttcagtgaacagccaggaaatatatacattttaaaaagtgcaattacactaattgttccagttcatatttaccagaacataatttttcatttctttgattttgtgtgtgtgtgtgggtgtgtgtgtgtgtcggtctaatttcatgttactggaaaaatctaaccctactggttctcttctcgcttgagaattattcagattttcctggttgttgttacgccaaataacgctttattgcaacctggacattttacatatttgagactttgggtatttttaaaaatcctttagcgtgtcaggtttttttgtttgtttgttttagcaacaaccaacacggttaattccagtgcccaagctcttccttgcctctttgtgcaaagcttccaatgtcagctcagcctccagagcctctgctgcgttgttttgggtcacctgtgcaagtgcagctcgtagtgagcctgggacttgtgctgctggttcatgcatgaagctagggtgctcctctccaggattcccccagccccccacacacgaagctagggtgccccctctccagctctcctctccaggattcccccagccctccacacagggagctagggtacccctctccagctcgcctctccagaattcccccagccctccacacagggagctagggtgccccctcttcagctctcccagaccccccaggaccccacacaggaagctagggtgcaccctctccagctctcccagaccccccaggaccccacacaggaagctagggtgccccctctccagctctaccagacccccccaggaccccacacagggagctagggtgcccctctccagctctcccagacccccccaggaccccacacaggaagctagggtgccccctctccagctttcccaggcccccccaggaccccattcacgaagctagggtgcccctctccagctctcccagacccccccaggaccccacacaggaagctagggtgcccctctccagctctcccagacccccccaggaccccacacagggagctagggtgccccctctccagctctcccagacccccccaggaccccacacagggagctagggtgcccctctccagctctcccagacccccccaggaccccacacagggagctagggtgccccctctccagctctcccagacccctccaggaccccattcacgaagctagggtgcccctctccagctctcccagagccccccaggaccccacacacacactctggctccmccaggggctctctttccgtttctctgactaggaaaatgtgatttctctcagtttttgccatctacaccctcaggttaaacccatgagagaatggaggaagatgaactgggaacctccccagatcagtgttgactgctgtattctgacagctcttgtctattctcagaggctgcaggttgcttttcaaaattgcgtccagaggccaggcatagtggctcacacctgcagttccagcgatttgggaggctgaagtgggaggatcacttgagtccaggagtttgagaccagcctgggcctcatagtgagacctcctttctacaaaaaaaaaaaaaaaaaaaaaaagccatccgtggtggtgtgttccttgtcccagctactcaggaggctgaggctggaggaccacttgagcccaggagttggaggctgcagtgagctgtgatcacactgctgcactccagcctgggcaacagactaagaccctgtctgtaaaaaataaataaataacataaaaattacatccagagtttttagttgtaatcattgagagaggtggactgtggcgtggtgggtgtaccccgtcgytaggggcaccagaagtcctaggactccgaatagcgtgtgctttgtgtgtgtaccacagacattaccacttacgcccagtgacgagatcatcgtcgtattctcgccaggtaaatcgggtccttcctcgctccaacatggtctacaatctctatgagtattcagtgccagaggacatgtaccaggaacacatcaacgagatcaacgctgagctgtcagcgccagacatcgagggcgtatatgagactcaggtgactccccagccaccctcgactgaactgggggaggctccagcagggtggtatggaggaaagaaacccgcccagggtgtgggctggggaacagcagcgacwgtggactcgttcccacaggtgaggtgaatgtcagcagtgtgtctgccaaaagtggcctttgggcagtgggccgggcagctgcaggggcacmgccacatcccgggcagaagtcacgtgggcagccagagcccccaccatccagcccttgccggcctgtctgcccgattcttccaggttccgttactgttccgggccctggtgcacctgggctgtgtgtgtgtggtcaataaacagctggtgaggcacctttcaggctgggaagcagagacctttgctcttgagcacctggagatgcgctctctggcccagttcagctacctggaaccaggtawggcctgcaccagccgcccatcatgtgcctgcctcccacacatctggggtgacggtcttgtttccttctccagggagtatccgccatatctacctgtaccaccacgcacaggcccacaaagcgctcttcgggatcttcatcccctcacagcgcagggcrtccgtctttgtgctggacactgtgagtcctgggccctccatggcagcacattggctggggcagggtttggggaaggaggacatctcccagggtgcccaggccctccaggtcttgtcctcaagggcctttgcccatgagtgcttgtcgtgattgaattggcagtgccgtggcagtggtggagtctgccccagggctgcccccacttcctcctgcgcagggggaggctgacgtggcctgcgttggtctaggtgcgcagcaaccagatgcccagccttggcgccctgtactcagcagagcacggcctcctcctggagaaggtgggccctgagctcctgccaccccccaaacacaccttcgaagttcgggcagaaactgacctgaagaccatctgcagagccatccagcgattcctgctcgcctacaaggtgagagtggttggggtcttgctgtgtgagccccatcttctttgaggctgggtccacccaggtcttttcttccattttgccttgacccaggaggagcgccgggggcccacactcatcgctgttcagtccagctgggagctgaagaggctggccagtgaaattcctgtcttggaggaattcccactggtgcctatctgtgtggctgacaagatcaactatggggtcctggactggcagcgccatggagcccggcgcatgatccgtcactacctcaacctggacacctgcctgtcgcaggccttcgagatgagcaggtgagcacagtactgtcgttgtgggccagtggtccccaggcagagccggcctcggtggtctctgtgacccggcgatgtgccccggtgctgacctgtgccctggtgcaggtactttcacattcccattgggaacctaccagaggacatctccacattcggctccgacctcttctttgcccgccacctccagcgccacaaccacctgctctggctgtcccctacagcccgccctgacctgggtggaaaggaggctgatgacaactgtcttgtcatggagttcgatgaccaagccactgttgagatcaacagttcaggctgttactccacaggtaagtgggcgggaggacgaggcccatgagacctggctrgtgtttctgccattctgtgacatcttctcaaggcaatagtgccgaggatgggctcagagttcgaccgcgcaggtcagagctgaggctgcaggagacggtcctggggtcaaggtccaggtggggcctcctgtgccctcgggaatctgaatagcctggcaggtgtgaggatgggtgtgggcaggtctgttgctggttctggaggtggtggtggctggagtcaggcccagggggctggtggtgctggagctggcaggatgctggctgagcatggcgtcttcctgtgcagtgtgtgtggagctggaccttcagaacctggccgtcaacaccattctccagtctcaccatgtcaacgacatggagggggccgacagcatggggatcagcttcgacgtgatccagcaggcctccctggaggacatgatcacgggtggtcaggctgccagtgccccggccagctacgatgagacagccctgtgctctaacaccttcaggtgccaccctctctgggaaggagtgttactaatagaagggtcttatcctttgcccttaatttggaaagctaaggtctaagacagggtccattgggcttcccttagtcttaatggcagagccagagaccactgtgtggcgagttttccatagtctattgtctttaccactgtgggggtccggcctggtccctggcgactgttcagtgtgctgcctctgacctccctgtggccagaggtacttcacacagagtctttctaaccagggccacttttcgatgtgaccaaaggtacatcacagggatctccagccagctctactgagtatgatgtgtgaggcatcagcacttaggtgtcaggagcygtcggtctgctgcagagggcgtggttgagggtcaggagccatcagtctgcggagagcatggttgagggcagctactcgcattacccaccagcggtggttcatgctgggcaatgcttgctgtgtaccaggaggtgggccgagcacttcgcattctgcctctgtccccacatcagcccagggacggggagcggttattgtctgtttttcagataaggaaactgaggtcagaggggctgcctttgtggtcataccacaaatgaatggaagggtaggtgctcaaaaacaagtctttgtaattccagagcctgtactcagctgtagttttaatgactccatacaaaaggggagagggagcatgccagagctgggaaatgaggcagggagaggactggtggaaagaggcagggaggcagttgggagccgggagcagggtcttggcagagagacagtagcccaggcctgaaaggtagaaggagtccaacagcagatacccaaactgccgctctggagaatgtggggtttgccraattattgaagagtttgtgatgaaagggagttttaggaatgggacttggacctctgtaggttctcttgtaacattctgttcttgaccccattgaagttccygcttcttcagtagggtgatgtgcagttttggaatcctttagctgaattggggttccagtaccagagcagctggcatctctgccccatgggaagtgaagggggccagacagggcgtgtacagtgcactggccaatgcctagctgtctggcctgtgaccagggccccccggaacgggaaacttgtttacactggcacacgcccttgtggcttttgtgtgacctgtgtctaggtaccacctgcctgaccattgcttcggtgtaggggcccagccttgtgttccccctagtgtcgtagggaagacccagcccagggcagcccctgcctcttcagagggaaggcacaaaatcagtcaccaccacaatagggaacaagtgcaaagatgtgttccttacagctcctgggcagggagggtgccgtgagtagggaggccatcctccatccctgggtcctgcaaggcaggactgaagagtcagacagggagggtgcccagggcagctaggcgtgtgagggaatggggtgtaggcatgtgttagttcacgggcgagcgcctgaatggtccatttaaaggaagtggcgggaaggcagggcccagcctgctaggcgggagagaggcctctaagttcttgtctctgaccagctggggccatgtgggtatggtgatgttttgttttgttttgttttgttttgttttgttttgtttttgttttttgagacagtctcactctgtcacccaggctggaatgcagtggcaccatcttgggtcactgcaacctccacctcccgggttcaagcgattctcctgccttagcctcccgagtagcaggattacaggcatgcactagcccagctaatttttgtatttttaatagagacggggtttcaccatgttggccaggttggtctcaaactcttgannnnnnnnnnnnnnnnnnnnnnnnnnnnnnnnnnnnnnnnnnnnnnnnnnnnnnnnnnnnnnnnnnnnnnnnnnnnnnnnnnnnnnnnnnnnnnnnnnnnnnnnnnnnnnnnnnnnnnnnnnnnnnnnnnnctcttgacctcagtgatccacctgcctcggcctcccaaagtggtgggattacaggcgtgagcctctgcatccggcctagtgtgatgttctgatgtctaggcagtggctttgctgtgtccttcctgtcagggtccccggcccgtcacacacttgctgctttgtactgtgctgccctcccgtcctgctttagaacacacagagtttgggttgtgttgagggatgcggtgaagcctgaacaagtttaaggaatgaaatgggaagaaacagatgaggcatgagggtgaagggatgaaatttggaycgtgacttaaggtggggacagtgagaaggggaggcgacagtgacggatttggacccagccgtgtagggaaaacctgtgcccatttcagttggagcgtcccgcgtggcagcagcgtgggaggctgagggtacgagggtgtcgtgcaccttctctttcaggatcctgaagagcatggtcgtgggctgggtgaaggagatcacccagtaccacaacatctatgcagacaaccaggtgatgcacttctaccgctggcttcggtcgccatcctctctgcttcatgaccctgccctgcaccgcacactccacaacatgatgaagaagctcttcctgcagtgagtgctcctcctccctgggctgtccaccgcgtcctcagctgggctggtcccttactccccagaaccagagacatggccagccagtgcctctgggataagtagtgtatttctgagtttgtggagcataacaatccaaaggatcccagagaaacacgcagctgctgctgcagcgtcgcctgcacatcctgcagagaacactaggtggcacctcctctcctgcccctttcctgcacaaagtcatgctacacattgtattgctgtgtgccttgttgttttagtgaaaatatgcctgtgtcaggagatctgtgtgaggacatgccatatgaaagaacatttagcctctctccagccttgtgccgttgttacaaatagcaaatcagtgagaggcttcatgcatgagctcatgcagatagatccgtggggtaattgctggggcgtagccctcttgcaggcctcagaggtgttgtaactcgggatgaatcctgatttgatggacttcaccagagcggccccacagaggccccttgtggacacttcttccctggccgcgcctcaccaacatggccggggattattacccaactgctgggataaaagtgcttcttggtgcagtcttaacttaggattcttacaatgaatgaagtcgaattttctcttctagtcctttgtctatttttctgtagttttggtggttcttctcttattaaatatcgaatgagttgtctccatacaaaaagttgccatttttctgtgataagaatttgctaattttttcctgtttttggttatcttttgcctttgtttgtggtggatttttgccatgcagaaatctttgctcttcattagcttctgggttctagtgtatctcggaggcttttctgcttcaggaccctcagctcttttccctcttggattttctgggtgccctctggctctccacgactgtggcgtctccaccacggactctcaacttgctccacaggctcatcgctgagttcaagcgcctggggtcatcagtcatctacgccaacttcaaccgcatcatcctctgtacaaagaagcgccgtgtggaagatgccatcgcttacgtggagtacatcaccagcaggtgcggctggctggtcctggtgacgcagcactgtggctttgagagggatgctaaaatgaccccctgaggtgccagctstcctyctgggtgggctgggaggtcgttagaagtgcaggactcaccatggtgaatctgagcagcgtgaaaagggggttaccrccacctgtgcgcggtagcagatcggaggccactcagctgtgcagcttgagttrggcaagttcaggaagtggcctgcctttgctaagaaggttccacagtgatttttgtttgtttgctttttttccccatggatattcagggcacagattcaaggtgccctgaatatatgcaccccgtaagtgttgacgttgtaagccttttcatagacgtcagtgttggcgagtggagtggtgtggttcccgggtgctcaggtgtgcacagctctcagctgtcagagcctggtgtggttttgacttcctgccttccaggcmatgttcctgaggttccctcctaggccttgctgtgcttctcacacactcagcactatttaaatctaaatagaagacaaagcaacagaaaaatctccaccagcaacttttgttcaactgatagtaggaagctccctcctaggtgcgctcaccctggggatgaatgcagccctttctgagcacagaggggagttgcttgtggaggcacagagagtctgcatgggtctgatctttgcatggttacaggggtagcatctgggggcgctgcagaaaaggctgacactaaattgataataggccttatcactgagaagtaggaaggtagagcttataagactttcattcctaatcaaaccatatgcactggattaatttgaaacacaaaagcactgttgtcctcctgcagacccactgtggccccttatgtctatccaagatgagccttgatggtcagtggtcacgctgtgtgcctgggaaagctggcttgggctagaattgtatttcggagcatggctgagataatgggaaggatgtgcctctccccacgttggccatgggcagctccaggggtgccctgtacctgaggaggccggggttgctcatgtcgagaaacaggctgctattcttccttagcgcgaagagcagagttagggagaacataaagttctcctgcaggagctgcratgtgggctactcagctgcattttgaaactgtgatttaggatgttcctycttccttcctctctttctttgtttattcttccattttttggggttttgtttgttttttaggagatggggtcttgctctgtcacccaggctggagtgcagtggtgcagtcatggctcactgcggcctcaaactctgggctcaagctatctgcccacctcagcccactgagtagatgggactagaggtgcatgccagcatgcccagccaatttttgtattttttgtagagacagggttttgccacgttgcctggggtggtcttgaactcctgaactcaggcaatcctcctgcctcagcctcccaaagtgctaggattacaggcgtgagccaccgtgcctggcctgttctttttttttttttttttttttttttcttaaatggatctaatgtgcagaggattgggtcagcgctagggaggcttaactgaggagtgacaaggatgacgatagcttaaaagagcttggcagtgggaagcactgtggttggttaccagcaggtgcaggtcacctaaggccgcagagcagaggcagaacaccctgtgggccatccccagcacgaggaggcacccagctctctttgtggcgccagctcccaggggcctggkgggcctccttagttttacgtttaccacatttccccaggaagcctgagggatgatgtgrtctgaatgaactttcaaattcagtgttaagtaagtggagggtacrgatagatacaaggggaaataaaggaaagttgagaacaaggtcgatttcactgaagcagcgtcttcaatgcttcctctgcagcatccattcaaaggagaccttccattctctgacaatttctttctctcgatgctgggaatttcttctctggatggatccatctaactatggcggaatcaaaggaaaagtttcatctcgtattcactgtggactggtaagcgagctgcagtgtggcacccgagccagctttgggggtcgcgttcattcctgcagcaagtgctgagtgctcagggccccggcgggcctggcygtgagcagcagacactgcacccgcatcctgccctcatgaacacggggagggaccatgcgcagacaagcacgtcagtgtggagtgtggcgtcagccctggtgatggcaaggcttgccgtgggcaacagggaggtggaggcccatgaggtggtgacagggaatccgagagctgatgaagtgcaccatagttgtgcgagcataaggcgcctccagcggayggacaccagggaggcaaagcacaagtcagtggagcagtggttgcagatgcaggcagagagctgacagagccaggcaacttgggcatggcagggcagggcctcggctttcgtggggatgggagcttctgtgtgggtgatgttggagctttcttggccccatgtggataacccaccattggagggcacaggcaggtaaagccggttagtgcctgtgtcagggagatgctgggcagcgaggttggtgagaagggcctgggtgggctttgaagtggagccaaggggccagcggatcggatgtgtgtaaatgcccaggtgcgggccaggctgtgggtgagtggaggtggctgtcgggagcagtctggggaaggggtcatgtctggctggggctcatggtgtttgcaaggttgagacrtgggtggtcagctggtgcaggagtggccagagagtggctgggtgggttgagaggaggcctgtgtcctccacaggggccctcatagtggactgagaggaagctgtgggtaccagagccaggggctcagatgtcagagggaaagccctttgtaaggaggcagacacttctgggagctggcaggatgaagccaagactgcccaggacacctggatgggagcgattctggttggagttgggggataaaccctgattgaagggattcagaacaaagtgggagggtagaaactcaggcagtgtagaccgctctgaggaggggatcagcgtgtggtcagggcaggtggcagtgggtgtcggtgtctacacagacgtggatggtgccgtggcacgaacacaggctgcgcgggaggctgggtctgtgatggggtcgtgccgtcccaggagattcatggactcagaggagagaacagtcaccgggaagctctggctggttctttcgtccttggggggtgggagttcaacaattaaagtgaactctggaagagcagagtgaagctcacagtcccaggtcacgagcacttctgtgtgccaggcgcttcccacaaagcactttgtactgggagccaccctgggggattcacgcaggctccaggggatgccttgactgcgaggaaggcctctggtcaaacggggcagatggacccaggttggaggagccttcgctgtggcatcctacccctctaccaggccgcgatggtgcaaacacagccacgttgtctcatgtgttacagcaagactcccagaaagcagggggagcagaggatgagcaggaaaatgaggacgatgaggaggaaagagatggggaggaggaggaagaggcggaggaatccaacgtggaggatttactggaaaacaactggaacattttgcagtttttgccacaggcagcctcctgccagaactacttcctcatgattgtttcaggtaagcccagagcccagggctgcgcagcccccactgaagggactcatggttagtagatgtggctcctgtgccatggtatcgcaagaagggagacagggaaaatcagatcgggcggagcctgcccagcagttgggactttgtgagccgaggggcctcctctccaggctccaggcatgttccactggagggcccggagaggggtgactgtcttccctccagcctttgctctcaggaaactccatggggagcggctgcccctggccgtgtcattgaggagtttcctagctctgctcccgccatctgattcggtaactcagtcacatacattcccagggaacatttgtgtgtgtgcacgttcagtagctgaagataaagccctgggtcaggtcagctgccccctggctggtctgtgaggcctaactttctggtgggggagttcctatgccttggtttgggtctgcaggcttagagtttgcaaatcaagctatgcaggttagtgtgcagatgaagtgtatcgaggaagcactgtttgtagttgacagccctaagttaaagaatgccctaagtaaaaacagcaggttgtgatgtgcacacacaggtggatgcggtcacagaggccttcgttgatgatcattttatatttttgtctacttgtccttgagtctttaactttctcagttctctcttgcaactttctatgtctcttttgaaaagttccgggttggccgggcgcagtggctcatgcctgtaatcccagcactttagggggctgaggcgggtggatcacgtgaggtcaagagtttgagaccagcctggccaacatggtgaaaccccatctctactaaaaatacaaaaagtagccaggtgtggtgcgcacacctttaataccagctactcaggaagctgaggcaggagaatcacttgaacccaggaggcggaggttgcagtgagctgagattgcgccattgcactacagtctgggcaacaagaatgaaactgtgtctcaaaaaaaaaaaaaaaargggtaagtgccaggtgacaggcccrgagtagtttttggagaagcttgctgatgccaggggccctgcctttgcttgtgttgggagctgtytttcacrcgctacccagtgagaggcttagtgtacatggccccatttatacagttttctctctgacartgaactcaggtgtcagcgagtgttccttctcatttccacttctcacttctctaatttacttttagctcatctaaaggctgcagataaaattattaacaatgacattttagcctcatctgtgaggcaatctgaccagccatgggtcccctcagattctagggtgtttgcagcagcccgactcagggcctgtggtgtgtgtgcctctccacagcgtacatcgtggccgtgtaccactgcatgaaggacgggctgaggcgcagtgctccagggagcacccccgtgaggaggaggggggccagccagctctcccaggaggccgagggggcggtcggagcccttcccggtgagcagtcttttgtcttttgaggccactgccatgtgccagtgacctaactcctctgtgtgccatgggtggtccccggtgccagtcccccaggtgggaggtccccagtgccagacaggtcccagacccctccctcagcatccttatacttccaggaatgatcaccttctctcaggattatgtcgcaaatgagctcactcagagcttcttcaccatcactcagaagattcagaagaaagtcacaggctctcggaactccactgagctctcrgagatgtttcctgtcctccccggttcccacttgctgctcaataaccctgccctggagttcatcaaatacgtgtgcaaggtgagagtgccagcrtgcgtgtgaggagaggacactaacgtacatgtgtaaggcgagaatgttactgtgtgcaaggtgaggctgtaatgcgtgcaccatgaacgtgctagcgtatgtgtgcaagataaggacaccgacatacctgtgcatggtaaggatgtyaatgaatgcaggatgaggctttcagctgtgcaagggggaggtacctacatgtgtagggtcagggtgccagcgtgtgcaaggtgaggagcaggtgtaagttacttgttcattccaccaacatttatcacgtccctgtcacatgcagccacagttgcggcatctgtgctcaggtgtgagcaagacaggaaaggtcctgccttgtggggcctgtctgctgccagccgaccggagaagggagagggccgttcagaggcgcaggtgctgtggggatggagcctgtgaggggcgctgggaccaggtgcaggaggagggaagacgcaaaggccctggggggtgagcttggtgtgttggtgaaggcacagccgaacacccagtgccaccggctgggaggatgggtcaccggagaccagtaggctggaccaggacccagagctgatgagatgagagcttgctcggatgctgaggcctttctgggaaaggcaggctgagtccaaggagggataatattaccagataacgaccgcgggtgtcagcccttacagagcagagtgcttcactgtccatttcctcactcagccttcccagcaaactgcatctcacacacggctaaggttacgctggagatcaggtgacagcctcaaggtctggttgtggtgaagaagtgtttttagctcaccattttaattcctttattgacttttacatattttaaattcatttttattaaggtgtaatttatatacagtaaaatgtactctgtggcgtgcagttgtgtgatttttcctaggtgaatggaattgcatcatcatcagcaggatacaggatagtcaccgcccgaaaacattccccgcactgccctcctcacctgacaccctttagccactggtgtgtcttccgtccctgcattttttttctcttctagagcgtcacataagtagagacattgtgcagccttttggatgtggcttcttagcaaaacacacctggaattggttcatccacgcgctcgtgtgtatcagaactccctttctgttgcgagcagtgtccattgtgtgggcaaaccacagcttgcttttcattcactggtggaaggacatttgcgttgctttcactttggggtgattaataacaaagctgctgtaaacattctgtaggtgtaggtttttgtgtgaacataaatttcaattctctgaggtcattttttaagtgtttgtttaacttgataagaaactgccaaactcttttctgaagtggctgcaccgtgtcagggtctcctcagcagtgtgtggcaagagttgctgttccacatcctcaccaggacttggtrtcattgggtttttaaattgcagctattccagtaggtgtgtagtggtatmgcattgtgtttctgatttgcatttccctggcgactaatgatgtggagcttttttttggagatggagattcactctcattgcccaggctggggtgcagtggcgcgatctcagctcactgcaacctctgcctcctggttagctgggattacaggtgcctgccaccacgcccccccaattttttktwtttttagtggagacggagtttcaccatgttggccaggctggtctcgaactcctgacctcaagtgatccacctgcttcggcctcccaaagtgctgggattacaggcgtgagccaccacgcctggctgtggggcattttttaatgggcttctttgctgtcctggtgtctgtcctctttggtgaagttttaggttttatccatttgagttaatttttatacaatgtgcatgctgtagatccaagtccatatttctgcatgggatatctgattgcaggcatatcctgtcttattgtgcttcgaagcggttacctgtatttttataaatggaaggtttgtgggaatcttgtcttgagcaagtctcatctttccaacagcatgtgctcactgtgtctgtgtcacatgttggtaactctcaggatatttcagacttttccactattattatatcagccgtgataacctttgatgcttctatggcaattgttttggggcgccatgaaccgtgcgcatagaagacaatgagcttcatcartgttgtgtgtgtcctgattgctccactcacgggccattctgccatctcgccctttctccttgggcctccccagtcccggtgacacaacactatagaaattaggtaagttaatagccctgcaatggcctctacgtgttcaagtgaaaggaagagtcacacgtctctcactttacataaagagctagaaatggctaaacttaggaaggcatgttgaaagtcgagacaggctgaaagctaggcctctcacaccagttagccaagtcaactgcaaaggaaaggttcttgaaggaaattacaagtgctcctccagtgaacacatgaaagataaagaagtgaagcakcctgttgctgayatggagaaagttgagtctggatagatcaaaccagatataacatcccctcaagccagagcctaatccagagcaaggctctcactctgttcagttccatgaaggctgagagctgaggaggctgtagaaggraagcttgaagctggcggaggttggttcatggggtttagggagagaagccgtcccagtaacataaaagggcaaatgaggcaacaggtgcgggtggagaggctgcagcgagttctccagaagatctgtctgggatcattggcgaaggtggctacactgacaacatattttccgtgtagacaaaacagycttcttttggaagaagatgccatctaggactttcatagctagagaggaggcctcagagcctggcttcagaggaaaggctgactcttgttagcggcagatgcagctggtgactttaagtcgaagccactgctcattcagtcttttaaggccactacctgcagctcagaaaaagattccttccaaaatagtactgctcattgacagtggacctggtcacccaagagctctgatggagacgtacaaggagatgaatgttgctttcatgcctgcggacacagcatcccttctgcagcccatggatcaaggagcaatttcgactttcaaygtttattatttaaaaatatatttcatgaggctatagctgccatagatagtgattcccctgatggaactgggcacagtaaattgaaaaccttctagaaaggattcaccattctggatgccattaagaacatttgtgactcatgggagaaggggtcaaaatatcaacattaacaggagtgtggaagaagttgattctgaccctcatggatgactttgagggattcaagactattgtgggaggcgtgactgcagatgtggtggaaacagcaagggaactagaattagaagtggagcctgaagatgtgaccaagttgctgcaatctcaggacaaaatttaacagataaagagtggcttttcatggatgagcagtaaagtagttttttgttttgttttgttttgttttgttttkagatggagcctccttgctctgtcgcccaggctggaatacagtggtgcggtcttggctcgctgcaacctccrcctcctgggttcaagtgattttcctacatcagcctcccaagtagctgggattacaggtgcccgccacaatgctcagctaatttttgtatttttaatagagacagagtttcaccatattggtcaggctggtctcaaactcctgacctcaggtgatccacccgccttggcctcccaaagtgctgggattacaggcacaagccaccacgcccagcccaaaaaagtagttttttttttaagatggagtctcgcactctcgcccaggctggagtgcagtggcgcgatcttggctcactgcaagctccctcccaggttcacgccattctcctgcctcagcctcccgagtagctgggactacaggcaagygccaccacacctggctaattttcgtatttttagtagagacagggtttcaccatgttagccaggatggtctcgatctcctgaccttgtgatctgcccacctcggcctcccaaagtgctgggattacaggcgtgagccaccgcacctggccaaaaagtagtttcttgagatgaaagtgaacattgtggaaatgacaaaggattgagaatattccataaacttagttgccaaagcagcagcagaatttgagaggaccgactccaattttgaaagaagttctactgtgggtgaaatgttatcaaacagcatcacatgctacagagtctttcatggaaggaagagtcagttgatgcagcaaacttcattgttgtcttgttttaagaaatwgccacagccaccccaactctcagcaataccaccctgatcagtcagcagcygtttacattgaggcaagaccctccaccagcaaaacgattgcgactcactgaaggctcagatgatcgttaatatttctgagcaataaaacattttaaaattaaggtacatacattgttttttagacataatgctgttatgcacttaatagactacagtatagggtaaacctaagttttgtctgggtagagtgactcacacctgtaatcccagcactttgggaggtcagggtgggttgactgtttgagcccagcagttcaagaccagcctgggcaacatggcaaaacccatctttacaacgattacaaacattacctgggcatggtggcgcatgcctgtcgtcccagctactgggaaggctgaggtagaaggatcaattgagccccaagaggtcaatgctgcagtgagccatgattgtgccactgcagtccattctgggtgacagagtgaaatcctgtcccaaaataaaaaaaatcacatagctttttttttttttgagatggagtctcactctgtcactcaggctggagtgcagtggtgcaatcttggctaactgcaacctccacctcctgggttcaagcgattccctgcttcagcctcccaggtagctgggatcacaggtgcacccgccaccatgcccagccaatttttgtatttttaatagaaatggggtttcactgtgttggccaggatggtcttgaactcctgacctcaggccatccacctgccttggcctaccaaagtgctgggattacaggmgtgagccaccacaaatcacgtaacttttatatgtactgagaaaacaagcgtgagccaaaaatcatgtaacttttatatgcactgagaaaccaaataatttgtgtgatttgctttattgtgatgttagtccattgaggtggtttgaaaccgaacttgccatatctccaagatacgcttgtattcaagaaccatttgttgaaaagactattctttttctatcgaatcatctttgtacctttttccataacttagtraccttatctatgtgagtctctttctggattatgtattctttttttcgatcttgsattcaatttgctaatatctcgttgcgcatttttgtgtctgtgctcaggctgttattggtctgtagtttcttagtacggtctttggttctagtatcaggggatgctggcctcatagaatgggttgagtgctctctctcttcagtgttttgaaagatactgtgtagaatcagcagcatttcttccttaaatgtttagtaaattccccagggaagcctgtcctcaccgatggaaaactgctaatgtagagaagtcagctgaggcgtctaaagggactaaggaagggaggaaaggacaccaggaaactgtagcctaaggtccagagggttctggtccagacagagcagcagggaggccccgggagctccttcccgatgtgggctgtggtctctgcaggtgctgtccctggacaccaacatcacaaaccaggtgaataagctgaaccgagacctgcttcgcctggtggatgtcggcgagttctccgaggaggcccagttccgagacccctgccgctcctacgtgcttcctgaggtcatctgccgcagctgtaacttctgccgcgacctggacctgtgtaaagactcttccttctcagaggtgcggctgagctccagcgggcccttcactgtggagcagaacatccgagggcactgcggtgtcttgagggcttctgcagctccagctctgtgggtcacacctgctgcccctctgactcacatggattggcaacaggccccttcccaggcctccccacaccatgttcggaatgttgtcctaggaagggctcaagtgcaggtgggaggccagagtgcgtgcagctgcactcaggagactcgcccgtcaccaggcgcttctcacagccccttcctctcctgagatcctgcccatggcactgtggtctggaggctgggctggtgacctctcgcactcttgctctgcctaggatggggcggtcctgcctcagtggctctgctccaactgtcaggcgccctacgactcctctgccatcgagatgacgctggtggaagttctacagaagaagctgatggccttcaccctgcaggacctggtgagtcgtgcatgctgcctgcccgtgtgccctggagtccacaggggggtttctgtgcactcccgggagccggggtgtgtgcaggtcctgaggcacgccctggtgtcttccaaggggcctgccctgcagaccagtccatgccctgagcctgatggactgttctgtccacactggttgagcacctgccttgggtcaagagctggccttgtgggtgcttcgttctagcrgaaggaggcagacactcccaagtgtgaagagaaggaaaggaggaagagggagttgcrcagctcggccacaggaaggtcttgccgaggggcatctgagcagaggctgggggacgcgccaagctgccgtgtggtggtgcacggcgttcaggcctgcaggatggagggagtgagcagggcctggaggaggcctcaggactgggcatctggggtggaacatccacagcgagggtgggtgtagggaaggcgctggcaccgtgggatgaggtcgtgcattttactcataaccgagggctggctgcacacagcaggggctcgaggcttactgatgggcccacgaatgtgtctcgcgagcctgtgaagaagcagcaggcaggtctggccagcgcgggagggctggcgcccatcggggctgctccctttcaggtctgcctgaagtgccgcggggtgaaggagaccagcatgcctgtgtactgcagctgcgcgggagacttcgccctcaccatccacacccaggtgggctctccctcatctgcctcggctcagcctggcctccttggcctcctctctgagtggactggggtctcactgtgcctgtttattcctgcaggtcttcatggaacagatcggaatattccggaacattgcccagcactacggcatgtcgtacctcctggagaccctggagtggctgctgcagaagaacccacagctgggccattagccagccccgggccccgggtgcctctgcgtccgtgccaggcctcctgatgccaaggccacatccccgtgcttccagtgaccagaccactgaccaccctgactgtccaaacctgtgaccccaggccagggaacggggaggaaaccaaagaaaaccattttcagggagctcagacgtcacaggagggagcgggagcaggatgtggccctggcctcgccagagcacctgaagaagcaggccgtgagcgaggctgcgagtgccctgggcgccgtttctcacgcagtgaatgcttttccaggcctctgttgcttcctgcaccacacctggtggggtgggagcgtcctctaggtgcccctagttctttgtcctgcctcccagagggaggaaaagcccctgggggcttctggctccctgagattgggctctgagacgagacgggttcccaaggccctggtggggctggagtctcacctgtttgcatggagaaatgggctggccccacagcctcacaggagcagtttgtgggctggtttccccrggaatccagaccctaacccgtgagaatctggattttggcttgtgagccctgcttatttggagccgggtctagagggaaccctctatcagcctcaggaaaacaagacctctgtgcacctcacttttggctcactgcagcccttgtccttcacctccacacaggaccagctggaagcagaaagaagaaaggccaatttcacagggcaccaaacaagtatgaaatgtaaatcagaaatgcagacaccccagacragagcctcacaggagggagggggccccacaggctccccaggaggctcgtgtctttggcccagagccagccttagtttgtccctgccatctactgtctgaggccatcgctgctacactttktttttatttgtatttcatactgaagtttctctaggttgtcactgtgtatttgtgcagagcgcctcagatcggggactgggtaccactgggcacgtgtttggcccctggatgctgctggggccgcctgcctggagaaacctgatgcctgctcagatggaggagtgctgaggcctccagagtggagatcaaatcaaattagggcaagcaggggaggagggaggctggctgactaggcttcattcctggaagcgaatctggagaaccctcaggaatgaggagtgatggggccgggggacagccgctcgtcccccaggaaggccacctagcaggaccaggggtcgcccggtgcagccgtgggcgccagtcagcctgggttcactgtgaggctagctgcgggcatttgagtagtggtggaggggtcagaaacgggaagctctggccctggttcccaagcagcggctcaaccagaagagccagtttctccaaaaatgagctggatatttgtgagccacacagcatgtgcaggccgtggggtgacctgaggccgatgcccgaggctgggaggccacagtcaagggaaatggggcccatggaagacatgttctcgccacctgaacacagcgctgggatgaggactctggagttgtgctgagacctccaaactcaggctttagggtcagaccagggtcgtcttacccgcccttctccgctctttgacctttgggcgtggtgttgctctcctgagactgggtttcccttcagaggcaggatgtcatctgtcactggcacaggtgacatcatgacgctgttctgggctcctccccccacccagtgggcaccagtctaaccactgcagcatctgaggatgcagtaaccagattacccccaggccctgatgcagttagtgctggctcccgggctggtgtccttccacccccgcctggcctgacttcccatctcggcattcctgccccctcccatggagtaggaatgaacactggtctgagcactgctgtagtctgagctttcgttttccttgtgtgcagctgtcccggcctccctcctatttctctcttcctgagtcatgctgtcctcccacattttgagatgagccagctttggtttggagtctggggtggccctgtcagaagcaagtgcactgaggaggtggcctgggtcccagtgcactcccagcctgggcagacctgaccgtggcctggctggctgtggggaccatgtgtcatggggcaggcagacatgtgccctgcacacctcgcaggctgcttagaggggagatgacccagacagaggtcaccgtgcagcccagctccaggccgacagggcctgacatcccatattgacaggctcacgatgctcctccccaaggaacgaggccagaaggttctgctcacaggtttattggactgagtatgttgtgacttctaagggaagagtctgggcagattcgaggttacaacgcctgtggggtggggtggggtggggttcccaagggcccaagaccgggagcagagcccctcagagctcagctggcttgggttccaggtggctgtgagaggtgatgggaagtgagcagccctgtagggaccagctggggaggaggtgtcaggggctgtatgccagggtggggcacaagcctggggccagagcgtgcccccagcccttgcacagggatcctgtggtgccccgtttcgtggagatgctccgctactgaggtgcccacgtccacgtgcaggtccctagctggggactctctggccccaccaggccgggtctgcagtccagtgagatggaaaggagctcagagttgagccaaacctttggggtctgtgggtgtggaggcttgggcaggctcggaggcaggagtgtccaccatctgctcagaaggggcagagatggggcaaggccgcaggggcgggaaggctgggccacactctgccccttgttggccctcctggcctgatggagggctggggtgctggtcctcggagcggtggccgggttcgggaggggcctggcccaatacacgggcaagggtcacaggccagctacctgaggggtggctcggcgtacacaccttgtcaaatttcttatggctgtagaccttgtttttgttcatgaatgttagcaagatccagtcgcacaggaaggagccctggggccagcagagaccggtgtgtaagggcctggtggaccccccgcacccgctgggaccccagagagggttccttaccaccccgacggaagtcagagctgtggccagattaataatggtgggaatcaggctgaacttccccggcctggggagaatgggggtcgtggtcagaatgtctgacggcgtctgatggggcttaagggaggggtggggcgtgaggagctcagacccaggctagcagggctggccacccacccccagcaggtgcaggcacctgtccatgcacaatgacgtcaatgcggatcccgtaggccttgatgagcgtgcgggtggtggtgccattgatcttgtagtatttggcaaacctgcaatgggaacgccagtgcccactcgtcctctgcactccagggctgccccacaggcattgggcctctcgggaccccaccacagctatgccagtgtggacagcggtgtcccaagtacagcacctgaagttgtagcctgacgaggcaggcacgtgcttggggtcaagcctccggaaggagtacttggggttgcactccgatgcaggcaggtccaggtcacagtcccagttgataatgaccccgatgacaccaccctgccaagaaggagccagagaagggggtcaggagggcacacgagaggcccctcgagagcccgggtcagtcccaggctgcatgtgaggtgtgcactgaggggcccatggggcagctcaggggtactggtgggcgtccagtgtctgaggcacaaggggtgccagcagccagccccatggccagtgtcaataattcagcaagcgccacaccggatgggttgcgctgatcgcatttctttcctctgcctgagcggggccagctggtcaggagggaggagggactggtcccctgtaccccaggccctctctgtgcaggtgggagcccaccctggccccaccctgcctgcgcttgccctgccttgtgtgcgagctctgtgaagctctccccagccttctccacgataaagcccagcttgaagatggggcagtagaggtcggaggcctcgtggaacgtgcagcgcttcaggtacccgtctgtgcggtcggcgatgttgcccctgaggaggcggtaggaggcgagacctgcaccccaaataccccattcccagaaggcagccctcaggctgggccgtcaccacaccccgcggctcttacttggagaagtggaatttggggtagtggatgctgttcttgatgaggatggtgaaatttggggccatcgtacccagaaattggctgaggaggcacagaagggttgtttagtcccctcttcccgcaaagcccccgcctggcattggcccccacccctccccagctcttgtcactcctgccccgcccgtttggcctctggtcagaggaaaaggatcagaggggaggctgggccccaggccggggcgcaggtgcacctgacagaggccccatcttccaccgggcaccagccgaacacctcgcaggtcttggagggcccctggtaatagggcacacagcgcccrgtcctcaggcctgggaggcagaggtcactgaggcattagcggggacgcagccctgccccacccgcccagccccagctggcgcacaccgaccgtttcccagcatgtccagctccccagccacgcagtcggcgtcggagaggcaggtggcgttgtggacccttatgctctagggtggaggcggcccagtcagggaccccgcaagggacagctggcccgcctagctgaggcggggtcccccagcgccgcgggatcccctcacctcggggcaggttccctgggtctgggagtgggtggcctcgaccctggtgatgatgctgaacacgctgcccccctgggctcagaaagagggggcggtcggccaggcggcagccgctgccccctccgcccactagggtagggtgcacggcggggcggggggcagggggcggcccgcacctcggggggcttcacgtactcctccacgtcccacactttgtgctcggacgtggtgatccccttgaccttggtgatgatggagctctcggggcccgtctcgctctcctggtagcttttctgnnnnnnnnnnnnnnnnnnnnnnnnnnnnnnnnnnnnnnnnnnnnnnnnnnnnnnnnnnnnnnnnnnnnnnnnnnnnnnnnnnnnnnnnnnnnnnnnnnnnnnnnnnnnnnnnnnnnnnnnnnnnnnnnnnnnnnnnnnnnnnnnnnnnnnnnnnnnnnnnnnnnnnnnnnnnnnnnnnnnnnnnnnnnnnnnnnnnnnnnnnnnnnnnnnnnnnnnnnnnnnnnnnnnnnnnnnnnnnnnnnnnnnnnnnnnnnnnnnnnnnnnnnnnnnnnnnnnnnnnnnnnnnnnnnnnnnnnnnnnnnnnnnnnnnnnnnnnnnnnnnnnnnnnnnnnnnnnnnnnnnnnnnnnnnnnnnnnnnnnnnnnnnnnnnnnnnnnnnnnnnnnnnnnnnnnnnnnnnnnnnnnnnnnnnnnnnnnnnnnnnnnnnnnnnnnnnnnnnnnnnnnnnnnnnnnnnnnnnnnnnnnnnnnnnnnnnnnnnnnnnnnnnnnnnnnnnnnnnnnnnnnnnnnnnnnnnnnnnnnnnnnnnnnnnnnnnnnnnnnnnnnnnnnnnnnnnnnnnnnnnnnnnnnnnnnnnnnnnnnnnnnnnnnnnnnnnnnnnnnnnnnnnnnnnnnnnnnnnnnnnnnnnnnnnnnnnnnnnnnnnnnnnnnnnnnnnnnnnnnnnnnnnnnnnnnnnnnnnnnnnnnnnnnnnnnnnnnnnnnnnnnnnnnnnnnnnnnnnnnnnnnnnnnnnnnnnnnnnnnnnnnnnnnnnnnnnnnnnnnnnnnnnnnnnnnnnnnnnnnnnnnnnnnnngtggggctgggagcggggcctcgcggggacagagccgggggcgcggcagcccagccccagctcttggtccaggtgtgggccgagcgcggaaccggcggtctcgaagttggagggtcgggattccccgggtgggaactttttccgagctcgaggagaaagacatgggaagtcccgccggcctccgcggcgccccccaccccgtccaggccggttcctgccgcggctgccggggcttcgagcgcaacctgcactcccgcctttgccagcagacgcctcgcttccagctcctgcctccgccgcagctccagccctcgagctggagagggatccacggccgatccgttttcttctttgcaagccagagttttctttctttctttctttctttctttctttctttctttctttctttctttctttctttcttttttttttggtaacttttcgaacctccaccccacccacattattttgaagcaaatcccaagcatcacagtttttcacaaaataattttaaaatagttattatgataaaatcagcatagcatgtaattaactattttaaagtaaacaattcagtgacattcacaacattgtgcaaccaccaccgcctctgtttcgtccccaaacactttccccaccccaaaataaaactcccatccattaagcagtcacgacccgttccacactcctcccatgccctggcaaccactggtcgcttttctgtctcagtgaatggacttgcctgttctggatatttcatatcaaggaaatgcaatatttgtttctgggttaatgccttttctgtctggcttcattcactgagcatgttttcaaggttcatccacattgtagcatgtgtcagggcatcaccccttcttatggccaggagaaatgtctaggctatccaaagaaggaatttagattgctttcaaactaactctgtgaatagtgctgt

SEQ ID NO: 94042 - DNA, 78519 bp, Homo sapiens
  misc_feature (1)...(78519): n = A,T,C or G
ttgttagaaaatgatttgggggctgcttttcattaaaaagaaaaaccttactgaggactcccataccctcactatctgcctaagtagtttcttcttaactcctctgtcattttgacactatccgtttgaaaaggtgaagcacactgagktcatccatggttgagtctgtttggcttcgtttcgttttgtttagttttaggctttccgcggcctgaagccatggtttttagtttctgtctctagtgataagcagaaaaaagggacgaggaaggggctcattaaaagaaaaacttagccgaattaaatttaaaagagtttgagcaacgaacgatcgtgcagcccccagaatcacagcagattcagagagactcccgcgcagccacatcgtgggagatttatggacagcaaaaggaaactgacctacaggaaatggaagtgaggtacagaaacaactggattggttacagcttggcgtttgccttattttaacacggttcaaacagttggctacatttctttggccaaaacttagtgactggcacaggtgtgggtcaccgttggtgtatacctccagttgttatagttcgtgatgtatagaaatacctttaggctgaaattaaatatgtaaggaagccgcttgaggctaaacttaataggctttagtggcttaaccagaaacaaaaactaagagcccatgactgtattctctgtctcggacacccctgcgacccactgtcataattgatcttggccaagtcaattatatattatcattgcttacaatgagggaattgtgctgattgacatagctagccctgatccatctcagattaggaaatataagaggctcataaattcttccattcgaaaagtgtggtcagttttcgtgtaagtcacttccaggtaattaggttcatctaacctcggtggtgatagtaaatcataaattacataagctacaataggcatactgttgccatttctggtcagccagtgtcctgacgcatgctttttggtgtattacaatcaagacatctgtgggaactgcggccggctggctcagtgaggcacaggcagtgggggaagatggcagtggccgttccactgcaggcgtgaaccctggagcagctgcgcagtaagcacctgcccaagagggactttatcaagtttctgcaggaccacaattcagattcgtttcttgcagaacataaattattaggaaacattaaaaatgcaggcaagacagctaacaaggaccatttggttacagcctataaccatctttttgaaactgagtgtttcaagggtatcaatactgtaagtgtttgcaagtgaaaaatgtgaagcttaatgaagataaacccaaataaacccaaagtctggagagtctctggctgagggtccaccaaaatatgcaaaatctgttctaaaaacrtgagataaggccaggcgcatttgcttatgcttgtaatcccagcactttgggaggccgaggcgggtggatcacctgaggtcaggagttcaagaccagcctgacccacatagagaaaccctgtctctgctaaaaatacaaaatttgccaggcaaggtagcacatgcctgttaatcccagctactcgggaggctgaggcaggagaatcgcttgaactcgggaggtggaggttgcggtgagctgagatcacgccactacactccagcctgggcaacaagagcgaaactccatctccccaaaaaaaggaaatgaacagcagtgaataacatctctcctttttgggagatggggagatgttgttcaaggctggtatacaggaacactacaggatgggactgtttttgatactaatattcaaacaagttcaaaaaagaaaaataccaataccaagcctttaagttttaaggtcagagtaggcaaagttatcacaggatgggatgaagcactgttgactgggtaaaggagaaaagcctcgattgaagagtgaagcagaatgggcttatgcaaagaaagggcagcctgaagccaaaattccactaaatacaaagttcgtttctgaagtggaattagtggatactgattgaaatagcagtgcttcagctctaaggatatcagcaacagtgataaaacttggccttaaagaaacttacgtaactaactagagtttgttactattggaagggaagagtcacctggaaaattcagagttaaaacttgtttgagatctctactaaaaatacaacaaattagctgggcatggtggtgcgtgcctataatcccagctactcgggaggctgagatgggagaatcacttgaacccaggaggcggaggttgcagttagccaagattgcgccattgcactccagcctgggtgacagagcaagactccgtctcgagaaaaaaaaaaacaaaaaaaaacttgtttaaactgatcccaacttttcagaaatgtaatcccttataaatccctgaagtccaaaatgttttacactacaactgtgtaaaatactggtcagggagaactttttccttttacctcatgttgtaaactaaatggctgaataaaaatatatccactggggggcggcgtggaaagacatctgtgataatttaatgaatgtgtgaatacaagctgaggtaaaggaagtgaattcaaatggagtactcaataaaaactcagcatcctgaaggagacatctgttgcctttctctgaccagcatccctttcccctctattaaaaatagaaagttgtttgaggccaacctggccaacatggtgaaaccccatctcttctaaaaatacaaaaattagccaggtgtggtgacacacttctgtaatcccagctaccctggaggctgaggcatgagaatcgcttgaatctgggaggtggaagttgcagtgagatggcaccactgcactccagcctgggtgacagagtgagactctgtttcaaaaaaaaaagaaaaaagaaaagaaaaagaaagtagtagtttgtgcaactacctctggctcatttcttgtggtctgtaggactgtgaatcaaggtgctcacattctacctgcaagctaacctccagaaagaatgtgaattttgataggagggacagaagactaaaagcgatgggaattgataagtataatggcaatgccctagaagagactgttcaatcatgagttgtactctaatttagagtccctgaattctgtcctgatggacttacctttctaaaggtgtgtggtgaaatctgcctcagtactgtaagcaatttgacatttttttcatttgctatttcaaaaaaaattagagctagagctgatttttgtggcgtgcaatcaaaggggtttagtgtatgcactttcttcctgtttcaacttctaaccacagccttaggaatgggaaggttctaactgaacatcatctgcaggaagcatgggtgatagcacatccccagggcctctcacaatgctggtttcagtgtagctgattttagggaaagcagaggtaaatcagtcagaatgagagaacaaagaggagggctgcctgttcacaaagaaacaaccccgtcataccactcttaacaatgaacactaaaacagatcatgacagacaccactttaagtgagtcttggtatgcccctatttcatgacaaacacctgctatttccaatttcactcaccaagaaaaatctcatttgtccctagaagttatgtgtaaggcttctgagctgaaaacaaaagcaaacggggaggtttgttactgtgactttctggattaggtaactaagaggacaaaagctatctgacccctgtctgcattaaagttccctgtccactttgtctctctctcttttttttactccacccccgaacccactttcttcctttgttctttaataacaaatatttcaagcctctggaaagccatgaattctgcctttgatatccaggcactagagagagtccttaaagaacccgagattttataataggaaaatttataacccacaatttaaaaaaagaagttttgcataacaaaattccaggaagtatgtgttattgacaacctcaaatacagcacagacaaggaatcttttaaaaagtctaccaaacttgataaaaagtttctcttatcaaaagcacatttatatgaagggaagaaggcagtgagcagataggaagtataggtttggaagagaaaaggagacatggaaaagtagctggaaaaatcaagcaacaattttttttttttttttttttgagacagagtttcgctcttgttgcccaggctggagtgcaatggcgtgatctcagctcaccgcaacctccgcctcctgagttcaagcgattctcctgtctcagcctcccaagtagctgagattacaggcatgtgctaccttgcccggctaattttgtatttttagtagagacagggtttctccacgttggtcaggctggtctcaaattcctgacctcaggtgatctgctcgcctcagcctcccaaagtgctgggattacaggtgtgagccaccacacccagccaatttctttttgcttttaagctagggaagatctggacagtttggaggcagaagggaaagagttgctggaggggaaaaggacaggcaggactggcttcatgggcatgtgacctatgcagtcagccaccccaggaccctgcatttggtttaatgctctgctggttctgaaaggtataaaccactatgtggtaggctgattaatgaccctctatttataaatcctcatcctaatctctggaacctgtgaatatgttatcctatatggcaaaagggactgtgcagatgtgatcaagttgaggattttgagataggatggtctgtaaccaatgtaatcacaagggtccttatacaagagagacagaagagttagggtcacaagagaaggcatgtgacgagggaagcagagagagtgaaggagatgtgaagtcatgaggtaaggaatgcaggtggcctctggaagctggaaaaggtaaggaaacacattgtccctgagagcctccaaaaggaacacagccctacaggtccattttggacacctgatctccagtactataaggtaatgaatttcttttgttgtatgcaactaaatgtgtgatagtttcttacagcatcaatgagaaactaatacacgctacataaacacaagggagatgtattactcgttttgtagaaatcaaaggcattaataaaactaatagcagttaccatttattgagtgcttcctaggtgctaggcactatactcagctctttctgtatctaatcttatgtagccctagaacaagatatgaggtgggaattaaggcccaataactagctagaatgttttagagttgggatctgcgcccaatctatgtcactctaagtttttttttgttttaccccatccccatatttcatcataagcctttgggtttgtcttcattctttagcatgcgttatactcgcacgtgtcaacctaggagtcgggctggggcggggcaggagatgacatccacatctagggtgcatgaaattaaaaaagagccgaagccatctctacaagtcacaggtagcttacataggcacccacagcagatgtgaggctacagaaaaatgaatgagacaaagaatacgcttcagaccgaaagtcaaagatcccgcaccgtccgttcctaactcgcccgcgtactgggtgaatcctagagcctggcgtctgcgaggactccaggagcgacagcagggaccgacgcagagaggtcctcagcctggtttcccggagaagaggtcgccccgcttcccccgcccgcaccccccggtgttttggaggcccgcgtggtcccgcctcattggccgccgcggagcycgaggcctcggggaggcggggcggccttcgcagttgtagttcccgagtcctctcgttcagcggctccgccttcctgccgcggcgcctaggcgaccgcccaggaccacaactcccacaaggccccgcgcttgggggcgtggccgaggagccaagmgagccgggggcggggccgcctgggggatgaagtgggggcgctcgcctttcctgcctcactcgcagctgccgggtgttggggaaagagtcgcctgcctccggacyggagtgcagacctctgaccctggagtcgctcggccgctgggaaccgtccccttgggtcgtcgcctgggccgcccgtcgttccccggccccgaggggtccggctggccgcggtgtgggtagaggtcagcatgagccaaggggtccgccgggcaggcgctgggcagggggtagcggccgcggtgcagctgctggtcaccctgagcttcctgcggagcgtcgtcgaggcgcaggtaagcccnagtgatagcgggccgggaacccccggccgaacacccgcggccgctacacacgggccgcggctgtgacgcggggagggccgggcagggccgggcagggccgggccagaaaagaggtgatttctggcgagcagaaaacccggggagcagagacctgaccgtccagtgcgggaaacatctgcgaaccgcccgcagggtggggggacggcgacactccgggtaatggcagtcaaaagaggaagatggtgacggtccccctgagctgttttcgttttttcctctcggatgtgttaagcggctgggagtgtggcgggagatgggacgggcrtgaaccacctcggctgtcttgcgaagggagcgagcgcccagagaaacggtgacgtccttcccttcaggagttagtgagggagggagactgagagttgggggcactccgcagacccccgaggccccgccaggcgcaggggattgggagggggcaagacttcactcgaactgtcggactagagctttctgggcttttactcttcctcgagcaccttcccttgctcaagattgctttatttttacccagctgagctgtgtctgccaagtggcatcgccaggtaagtcccaatacgagactgggggggtctgagtggggcgttgtggctcgtggatggaggctctggctctggcagtcgtgaggtgctggctggttgttgatgtgaagcgatgattacaagtgttctcagtgtgctagaaatctgaggcttagctgaccagatcctttcgccttcagagaggtgtttgcttctattcagtagaatttgaattgattgccaggtgctgctgcttgttgtctgcacctgctgcaaggaggcagcactgctgagggccaaaaaaataaaacgaaggtctcaggtggcctgatgatgaggggagatgtcatttgaagcaattagtgctcatccaagaaaaattgaaggtgactctgagtgtaaccgtgaaaacatgtttttctgaattgagtcactttatttcatggttttatggtgccctgcactaaatcccagagtgcctgaatagtccgtttgtgtctgtgtttgaaccataaaaataaaaggggcaaatttttggtattggggaacatgttaaaatgcagattctctggccctacctccacatgtattgattggatctggaatatggcccagatatcagcattttaaacaaacattgcaagtacagtataactgtagcaaagttatcttttgactacctcttggacctcacttggaaaacactgagatggaatagatagtggtaatctgggcagacttactaaagtaaattttccaaattgtctttggcaaaattattttctagtcactagttgagtgtttctgagtgaaatttacaattcgatatttttctgaaatgagagttcccattttctctttttatatagcacatattaatttatgcttatctgtctagaaacttcattttaaatttttttcatttaccactaattatgtgtaattaatgttttataatttcacctgtatttttaaaattcttgtgtagagatggggactatgttattaggctgatcttcaactcctggcctccagcgagcctcttactttggcttcccaggtgctgggattacaggtgtgagccactgtacctggcctgcccctgtacttttaatttcattatatccaaatgaatataaatatagtccaacagttaaagatttgtgaatatttgaagtagcattgtgccaaacagtcttccaagtgaatatatttggtttttgttgccagcagtacttactttctttttttttttttttgagatagtgtctcactctgttggccaggctggatgcaatggcatgtgttggctcactgcaacctctgcctcacaggttcaagcaattctgtctgcctcagcttcccaagtagctgggattacaggtgcttgccaccgcgcctggctaatttttgtgtgtgtgtktktttttttttttcccagtagacagggttttgccatgttggccgagctggtcttgaactcctgacctaaggtgatccgcctgcctcggcctcccaaagtgctgggattacaggcgtgagccaccgcgcccaggccgccagcagtactttctactgtgctgtttttttttttttttttttttgagatggagtctcgctctgtgtcacccagactggagtgcggtggcgccatcttggctcagtgcagcctccacctcctgggttcaagtgattcttctgtctcagcctcccgagtaactgggactataggtgtgtgccaccacacacggctaattttgtattttttagtagagatgaggtttcaccatgttggccaggctggtcttgaactcctgaccataggtaatccacccrccttggcctcccaaagtgctgggattacaggcgtgagccaccgtgcctggcctgatcatcttttagatagtactttaatctataacatggttacacgtacaatctctccgaagtgggaccattgaggtaattgaagttcaaagaacttaaatgtcttaattgaatgagtgactttacagtggagccctaatgtggaaccctttctggtctatacagtatgttggtattttcagttctctctagtatagaaaaagagatggaaaataggaaaatcaaaaagtggaattcagccagttctttgacttcatccatataataaattggtagaaaactgataaagggaagaattagaatttttgaaaactacctctgttcacaagaaatcaaagtcattaaaggagatacatattttaaatgttatccccttccaaaataaaagcagaaaaatatttttgaacacacaaaatgatacgtgtttgtatatctcatgccccattatcgtataaatgaaatgtaaatatactttggtgaagcactggaaactaaaggcatagtgcatacaagtgatataacaatcttcctttaaaaagtaatttcaattagatatatgtaagtttttctaaatgcatttctgaggtggcataaaattgagtaatacacagagcccctcaatatatgaaaagccagaaacttagaactyaaatagtgctataccagtccgttactctgagggcttctcctaaaccctaaagatcttgagctgctttagcagttgcatggagtggagtgggcaagaaataaccccgtgtctgcccagtgagaggaaactaataggagcctccaccataattcatttctcgtttacccttatattgaggatgtagctgtttggagcctggacttcaaacaattacatcctcagtataagggtaaacgagaaatgaaacccattctaagtaaagggaataaaagaaacttgctgggagaagcagggaagaaacttttgagaatttgtaaccatgagacagtcctcacacaggttcgcaagccaaatatttattctgggaaaattcatagcagtcccaaatttgtgtgccctgggtttccaataaaagcaaatatccatcacctctggaggaatttattttcaactcaaacctcgaaaaattattgaagatgaagtgccaaggagaataaacagctagcagtaaaatatcacaaaacacccaaggaaacagggcaccatgaatcagatattagacaacagaaacaaacacataatgaccttaggttctgaaattatcagataatttaatatcactatgtttaatgtgttcaaataaaaagaaacttgaagtatagaagggaaaaaagattttaaagagtggccaaaaagattttaataataatgaattagaagttctagaactgaaatttaaaactcgatggatagattaaatagctgatcatatccagctgaagaaatgattattgaattagacaaccatttcatgtcttttttctttctccttaatyctccatcaccttttcatctatccttactctcagttcataccttactaaaattggagcaatcagaagagaaattccacagagtaacccatatctatccatttactagtctctgtacccacatattttgacttcctgttggttaccattgatgaactgtgtgcttttatcaaaggcagccccttcacttgtatgttaggtctcattccttgtttgccgctcatggacatggctccagtaatcttctctttctttcctggatcatcagtttttccttctcaaatggaattttactgtcatcatgtattagtccattcttttttttttttttttcctggagtagagtctcgctctgtcacccaggctggagagcagtggctcgatctcagttcactgcaacctctgtctcccaggctcaagcaattcttatgcctcagcctcccaagtagctgggattacaagctcctgccacaacgcccagctaatttttgtatttttagtagagatggggttttgccatgttggccaggctggtctcaaattcctgacctcaagtgatctgcctgccttggcctcccaaagtgctgggattacaggcgtgagccactgtgcctggcttagtccattcttgtattgctgtaaagaactgcctgagactgggtaatttttaaagaaaagagatttaattgactcacagctgtacaggaagcatggctggcgaggcctcaggaaacttacaatcggggaagtgctgcacacttttaaacaaccagatctcatgagarctcactatcaggagaacagcaagggggaagtccgcccccatgattcaaacacctcccaccaggcccctccccaacactggggattataatttgacatgagatttgagtgaagagataaagccagactatatatcataaaacatgctgctaattctactgttttaaagttatcttttcatccacatattccttctgcctttgcctattttttctgttccctctagaaaattcaagagttagatttaatttattcttcctttgctggttcttctatttttcagcccattctaatcagacttttgctcctaccgcacctctgaaactgctcttggcaaggtygccgatgtcctccttgttgctaaggccaacggtttgttcttaaacctcagctttacctgttggcggcattttttcacaactcatcactcactctccttgaaataatttttattctgacatcctggatactaaacttttctgattgtcttcctgtctagtggaccagtctgtcttagcattctttctttgttcctcccctgccmttgacygctaatcatttgaacctcagggttcaaagcttgtactctttcttctctttatcttagtcatctcttctggtctcttagctttaaataccaaatgtacagtggactctcagtgttagtctccaagactaggattctcagctttagatctatgtatccaacttctttttggacatctccacttggaggattaatagatatcacaaacttgatatagaaaccacatttctgatcttttcccccaaatctgctttttccacagtcttccccccttatacataagctccagccaaattggcctgcctgttgttcttaaacatggcagatacattcttgcctgaaagcctttgtactgtttcttctacctagcacacacttttctcgtgtattcatatgattcactctgttagatttctgctaaagtgtcactttatctgacatctcttgtcttaaatgtccctgaccacacaaatataaaagagaaacattctatcctcaccaaattcctgtcaccctttgcttaaaactccccattggcttcctgtctcacatggtgtcatccaaaaatatatttggtctttatttctgattgctgacatagagccctttaaaacccttggaatttgagtcataggagtgccttttgttactcataatgagcccctttcaatcacacttgtgtttatagtaatgaaatgacttaagacggsgaccctacatagatagcctcaggattgggggctggtcaccacaaagacccaagtgattagaaagttgaaacttttggccccaccaatctgcaggaaggggagaggtgggtgctggagatttagctccgtaagaactcttgaacaacttgatttgatgagcttccgggttggggaatacattgacttattgggagggtggcatgttgagagaggcacggaggctctgcacatccctctgccttagtagcttgcccaatgcatctcttccatttggttattactgagttgtatcctttataattgataactgtaagtaaagtgtctttctgagttctgtgagccattctggcaaattatcaaacctgcaatggaagtgctaggaacccacaattgatagccagtcagaagaacaagtggctcaggacctgagatttgtgtcaggagtggggccatcttgtgggactcagcccttaatttgtaggtctgcactgatggtggatagtgtcagaattgaattgttggacaccacccagttggtctcagagttggagaattggttggtgtgagaaaataactcagattcagtaaaagctaaaatcttatagtggtctaattctccttcttgcctattgtatagtcctccttattcctcaaaaacayggggcaagcttactgcattaggatctttgcactcactcccaatgcctggaatgctgtccccccagatacctgcatgtcttgctccttgccaaaatttcatgacaccttctgtaactgtcctattttaaatggttagcagccccagttctgcagtctgtttccagtccttagttttatctatatcactttattaccatctgacattytgtactttgttcattcattttgcacccccttttccctatgagaatgtaaactccttgagggcagagatttttgtctgtcttttttttttcttctaattttatatccccagcacttaaagcagtgcaaatcttatgttgggcctcagtaaataggctgaattaatgaataagtgaatggaagatagatgcaaataaattattcagaatgaaatctaaagagacaatgggataataaatattaaagagaacttaagatacctggagaatagagtgagaatgtctaatacatctaattggagttctaaaagaatataatagaatagggaagaagcagtattgatttctgcagatgagtatgaagaagataacctaacagaaaagtgaatcaaagatataaatagacattttacacaagaagaaatataaatgtgtcataaaacatatgaacattgtaccttcttagtgcaaataagaaaaaagataayctttcatgctaactagattggcaaaaattaaagcatagattaatattaaatattgatgaggatatgggctggcacagtggctcacacctgcaatcccagcactttgagaggctgaggcaggcggatcactggaggccaggagtttgagaccagcctggccaacatggtgaaacgctgtctctactaaaaatacaaaaattagctgggcatggtggcatgtgcctgtagtcccagctactcgggaggctgaggcacgagaatcacttgaacccaggaagcggaggtttcagtgagccmagactgtgatcctgcgctcttgcttgggtgacagagtgagactctgtctcaaaaaaaaaaaaaaaaaaaataggatatggctcaacagtaagtcccattcattgttgaggggctgrtaaattggtaaaactgttttggaaatcattttgccatttcctgaaaaagctgaacatatactttcagcggttcyattcctaagcatataacctggagaaactcttttttttttttttttcttttgagacaaggtctcgctcttttccccaagctggagtgcagtggtgtgattttggctcactgcaacctcgaccccctgagttcaggtgatcctcccatctcagcctcttgagtagctgggactacagatgctcaccaccagacctggctaatttttgtacttttgtagagacagggttttgccatgttgcccaggctggactcaattctcctgtgtccgcctcccaaagtgctaagattacaggtgtgagtcattgtgcctggcccaacctggagaaactcttgcatgtgtttttacaccagaatatgtgyccagaaacatttgtgtagcaatgttctttagccaaatctgaaaacaatctaaatttggattgtggtaattttctattgctgttgtgacaaattgccacaaatataatgacttaaaaacaatataaatttatyatgctgtagttctgggggccagaattctgaaaatgggatttacagggttaaaatcaagatgtcagcaaggttgcatttccttctggaggctycttttcaagcttctaggtattgtcatgatttttggcttatgacctctttattccttcatcttcagagccagcagtatagcatcttccagtctctctctgactctgacactcccgccttcctctctcataaagaactcrtctcacctgaataatccagtatacyccttccatctcaagatcctcaaattaatcacatctttgaagtcccctttgccatgcaaaaataatatatttgcttatttcaggaattagggacatcttgggggtgggrcattctgtctactgtatgcatcaagagtagaatggataaattatgatattctaataaaatgtaacacttgcaacagggaaaatgaatgaggtgctacaaacctcatcatcatagatgccataataamgtgttaacaaaagaggcacatcacagaaaaattcacacattagattccattaatattaaagttcaaaaatgggggaaaaaaacctcaagcatattgtttagggatgyattaccagaaaaggaaaaactgataacaaaaacaakatttatttctacctttagggagagggaggtagatgtaattaaagaggagcttaaaggatactggcagtatttatttttattttttatttttttcctaagwttcagggggtacatgtgcaggtttgttacatgggtatagggaatttttcagctcttgtccccctctttcctcaccttttggggtccccagtgttgtttccttccttatgttcatgtatactcagtgttagctcccacttacaagtgagaacatgcagtatttgattttctgcttttgcattaattcacttaggataatggcctccagctgcatccatgttgctgcaaaggacattatttcatttttttwaaatggctacttagtattccatggtgtacatagaccacattttctttattccatccaccgttgatgggyacttgactacgtgatgattgcacgacttcagtactgtgaatagtgccgtgataaacgttcaagtgcaggtgtctttttgatataatgatttcctttgggtagatagatrcccggtagtgggattgcagggtcaaatgatggttctacttttakttctttgataaatctccatattgtttttcataggtgttgaactaatttgcattcccactaacagtgtataagcattcccttttttccacatccttgccaacatctgtttttttgttttactttttaatatgatactggcagtatttaaaaagtttttggtgatacacaggtttctgtctcagtagtcttttaaaggttacaaatatgtacatggcaactttgttaacccatcccctaccacaattaaaatgttttaaagaagtaaaatatggtgctttataaactaaaagtcaacaatttaagaaaaatttataagaaagaacaaaaaaactcaagcatattgtttagggctgcattaccagaaaaggaaaaattgataacaaaacaaaaacaagatttatttctacctttagggagagggaggtagatgtaattaaagaggagcttaaaggacactggcagtatttattttgttatttaattatatattatatataaaraacaatcactagataaaatatttttaaaacctagggagctttttggtttgtatttttttcctatttaggggctatgatttgaagtctttacaaacatatttcagaytggctggggaggaaggaaaaaatagaactcgcagtcttgtaagtagtaagtgagagcaatggaatgaaatttgggagttagtgacaggatcctagtgagtcggacagcaaagtaaatgtaactctagagccaaaattcttggtaatgatcatttatctcaagataatatagccctaactctgttgaagggagtctggggacacatttatactcctagggagagagaatgagaatgaaacagcttgcaaggactggtttccattttctgatcattacttgcatatattcctcctatggaccatataaataacctttaacaggctgagacccattttttgtttttttgaaaattttggttgttagttcatatggagttgcaagaaataacacagaaatcccatatactctttatctatttatcccaatggtaacatcctgtaaacatgtagtacagtgttataattgggacattgacagtgatagaatctactgatcttgttcagattctcccagttttacttgttttgtttgtatgtgtatgtattagttccatataattttatcacatacataggttcatgtgttcaccatcacagtcaaaatactgaacagttttgtcaccacaaatattgcttctgttgcccttttataaccacactatttccttcctaccctacctaccccaycatccatcccctaccccagtccctaatccctggcaacaaatgatrtgctttccatttctaaaattttttcatttaaaaagtgttctgtaaatggaatcatatagtgtgtaaccttttggcttggctttttcattcaggataattcctggaagataaatccaggttgtgcatatcagtcaatgagttccatttttaatttagccaaagattgttttatggaattttgggactctaaattcactttgtaaataccaatttctcttcttggattagcaaataatctttgaatagtggataagatcattgattttaaagtctgatagattgggaataagttccatttctactttggaaaaattaaggttgctaaaccttaatttccttatatgtaatatgaagattataatacctcattcatgaaatacttttaaagaggaaatgagataatataaagctcttaatactgtgcctgtcatgtaagtgttccataaatggccacctaaaggaaagataaaagacatgggttactacagcaatattattacagtctgtaacttctaggttagtttgggaagatattgctttggtattccagtggccacttggatttcatatatgtttaagtagaggaaggagaattcaatactcttcaagtgctaaagagaaatgttcttccaaatgggtatagctaatctttctattgttttttatctcattggccacagtaaaaagtaagttgactgctttaatgttatatcttaatcagcaagtaccggctaacttgaatgaataaattacatttttatataatagtgtagatttgttaaggttgaaacatcagtagtttacatattttaaattatataaattctaggtcactggagttctggatgattgcttgtgtgatattgacagcatcgataacttcaatacctacaaaatcttccccaaaataaaaaamttgcaagagagagactattttcgttattacaaggtaaggttgtaattttttattctgttgatatcaaaggtttatatgtgacctttatgatccttttgaaagcccatttcagttcctctcagcaccttgtgtatatctttcatcactgaatttattatgtattgcagtggaaacctattgatctttttaaacagtacaaatcttagcccccttcctttgtatggggagttcctcatttttcagttttggtttttaggcagagactrctgtctctatagaagctgaaaatgccacagacttactttgtcagcctctcttataacatagttctgccatctggacacacctactcagcctttgagttgtgctgatgtcagtgtgctagcattgttagtggaaaggaccacagcagcatctttgttggacctctttctgagagggctggcaaaacaggctgaggctccaagtagaccactaccgacagtgatgctccagaattggttcttaaatctagtaatagtctactctagacctttacaaaataaccggtgatactttaaaggcagcagcaatctttaaatatagcagtaaggcaatattcaaaagaacagtgttttaaattttagaacaacattttattttattttattttttattattcttactatttttgagatgaagtctcgctctgtcacccaggctgaagtgcagtggcacaatctcagctcactgcaacctccgcctcctggcttcaagcgattcttctgcytcagccttctgagtagctgggattacaggcgcccgccaccacacccagctagtttttgtatttttagtacagactgggttttgccatattggccaggctggtctcaaactcctgatctcaggtcatccacctgcctcagcctcccaaagtgctgggattacaggtgtgagtcactgtgcccggcctaaatatatgtattttgktatttaataatatatatatgtttttgtttttgcttttattttttctctcgagacagagtctcactccrtcgcccaggctggagtgcagtggcgcgatctcggctcactgcaagctctacttcccaggttcacaccattctcctgcctcaggctcccgagtagctgggactacaggcacctgccaccacgcacggctaatattttgtatttttagtagagacrgggtttcaccrtgttagccaggatggtctygatctcctgaccttgtgatccrcccgccttggcctcccaaagtgctgggattacaggcrtgagccaccgcgcccggccttgtttttgctttttttagagacagggtcttgccatgtttgcccaggccgatctcaaattcctggcttcaagtgatctatcgattgatcaatctatctatctatccatgtgtctttttgtttyctaggcttacgtcagctaaattaatttttttttgtttttttttagacagggtctckctctgtcgcccagactggagtgcagtggctccatctcagttcactgcaacctccgcctcctggcttcaagcgattcttctgcctcagcctcccgagtagctgggattacaggcgcccaccaccacgcctggctaatttttgtatttttagtagagacgaggtttcaccatgttggctaggctggtcaaattaaatatttttgatgattaaaaactagtatcttgtgcagaaatataacaaataagagaattaaagatttgggaacacatctctcttatcagcaccaggaacatccaaaaaaggtgatgtatgtttctcctctgtacaaaatcctttaggaaagcatatttcatgaatttatttcaaagagtaatctatacctaaatagactattgagtgtctgttactctaggcattttacatatgaataagacatgtgcttctttcatttttttttttttcccccggaggggtgcaccgttcctgaagtactgcaataccaggtcgatgcgaggagtggatggagcaagctcctattccatctccctactccaaaaatccatgtaatatattgttctcgggtagaggacatatcaggtattaacagatacttcacttgatcttagccaaaaggccgagaagccattggagagacaggtgcttctttaaatttccaccactaaatctataaatctaagtgcatttgtagctgctttctcttgtttcttttctaccataacattgaactatatgaaatttttacttttatatttcaaaaatggttgaacatgccagtttcatattgctcaatgtaatacagtgggggaagtgtttcttgtatcaaaaaccatctcttcacaagtggtccagttcacatctctacataatgttatgtccctcactctttcactccttcactttgggtttgtatcttgtgtttctctatccctagcaggcttggtcagtagaagtactcaaatatttgaatgtttgaatgaatatctcgtttaatcttcacaccaaaattttctcaatattagtcacatttttcaaatgaaaaagtaatagtttaggtattccaggtagggtatttttgttggctaacaaacaaaacagaagttttattaagaaaagatatgaagtagctaacaaaattgaaagacaagctgaggaaacatacttcagaaaagataaaactaaagctggaactaatgaccatttcctttaaggaaccactgggattttgtatcaaattaactattttcccatattttccaaactttatgtaagagttatatttctgtccaggtacggtcatatgaccygttggaccaaaagaaggaaggacaccttggttgacagtctcatttgcatgagtaaaagtggagtcattgtttcccaaagggaaattagggactgttacaaaagaaggaataatggaacttggataggcaaaagtgacaatgtggttcttggctactcaacaatctgattcttcctcttacacatgcagtttaaaaatgttctgatcaacacagtgaaattattccatatgaaaccaaaacatgctcataccctctcacagaggagggttaatgccatgatctagttaatgcattcagctctaactctaggatatttgggtgatatctatgcctctttttgttctgtcagcctataaaagaaataagaaggaatatactctactcaatatactctacctacaacagtggcaaagaaaggaaagctttaaaaagaaaaagctaagagaaraggttaatttaacttattattattttttaattttaatttttttttttttgagacagagtcttgctctgttgcccaggctggagtgcagtggtacgatcttggttcactgcaacctcagcctcccaggttcaagtgattctcctgcctcagcctcctgagtagctgggactacaggcccacaccactacacccggctaatttttatatttttagtagatacggggtttcaccatgttggccaggctggtccgcaactcctgatctcaggtgatccacccgccttggcctcccaaagtgctgggattacaggcgtgagccaccatgcccaaccaaaaagaagttaattttaaacacatgattcaacaagcaaggaatacaggtggaggtaacagtctgcctttatgcagttgggcagttggctgctgtagctggtatttctaacttctctttyttacttcttattcctttcctttatgcagtaaatatttattgaatgattagtttgtgtcaggtactatggatacagtagtgaataagacaaaacttttctgataagagagacaaacaataaacaagtaaacaataaaatataatttcagatgcttataaggtaaattctatggagaaaagtaaagtaggagagaatgaatattggggaattggagggtgggagaggtaggtagccctacattagagaaagtatttgggaaaataaggtatttatgctaatgtaacatttgagcaaagtcctacctaatgtgaaagagccatgagaaggtttggggaaagaacatgccagggaaaagatgtagaataccaagtaaatggtcttgagatagaaataagcttggtgtgttgaataggcagaaagctggtatagctggagtgaacgagagggagagttggaaatataggtaggcaccagatttaaaaaacagtaggaccgtattgaccatgtaaggatgctggattttattttaagcaggataagaaactactgaagggatttttgtgcaaaaaagactgtaagggtagaagacaagaaatagaggaaccayttaggagactcttgygttagttcagataaaaacaatacagatttgcaatagaatgctgcagctgaaaaatgtagaaaatgatcaaattagggttgtacacaaaaggcaacaccagcaagcttttctgatgaattgagtgtgacgtatgatatagaaatgaaatcaaggatgatgcctaagttttgagtgcacatatacaagcacaaatgtacatatatgtaaaatcatgaccaaatagattttattccaagaatgcaaggatgattcttgcattgatgttgataatcatcaaaattcaatatgtgctcctgatttttaaaataataagaatgatgtatatttcttaacmtgatgatttcagtcctaacatcagcatagctaacacgtcttgcatatggggaaacactagaggaattctcacttaggtcaggaaccaagacaaggatacccactatctgcattaactgttggatatactacccagcacagtcaaataagaaaaaaacaactatccagtgtgatggctctgatttaaaaaaaaaaaaagagaaaaaaataactagagccataaaattttattttacttttttgtgtataaatttaaggggtacaagtgcagttttgttacatggatatattgcctagtggtgaagcctgggcctttaatggaaccatcgcccggatagtgtgcattgtaccccttatgaaatttctcatcccttactcccctcccacccttctttttttttggagacagtctcacctttgttgcccaagctggagtgctgtggtgtgatctcgactcactgcaatctccacctcctgggttcaagtgattctcctgcctcagggctcccaagtagctgggactacaggtgtgtgccaccatgcctggctaatttttatatttatagtagagatggggtttcaccatgttggccaggttggtcttgaactcctgatctcaagtgatctgcccaccttggcctctcaaagtgctaggatgatatgcatgagccaccatgcctggcccaccccacccttctgagtctccagtgactattactccacattctatgcccatgtgtacacattatttacctcctactaataagtgacaatggagaggcatacagattttaaaggaataagtataactatttccatttataaatgaaaaaagttgtctgggcatggtggcttctgcctgtaatcccggcacgctgggaggctgaggcaagtggatcagttgaggccaggagttcgagactagtctggtcaacatggcagaaccctgtctccactaaaaatacaagaaactagctgggcatggtggcgtgtgcctgtaattccagctactggttgrggggcaggcagaggcatgagaattgcttgaacccaggaggtagaggttgcagtgagccaagatcacgccactgcactccagcctgggtgacagygagactctgtctcaaaaataagaaaatgtagttayatgaaaaaagtwatatgtaaaaaatgcaaaagaatcaataataaaaacaataaaacatatgttaatatagcaagccataaacktgatatacaaaaagtcaatatcttcataaatgtaaataataaccatttagaagttataacagaaaggaaaccaccatttacattagcaatgaagccaggcatggtggtgcatgcctgtagtcccagctacttgggagacttagctggaagtatcgcttgagcccaggaggttgagacaagcctaggcaacatagcgatactactgactcaaaaaaaaaaaaagcaaacaaaataaaacaaaaaatatattagygataaaacagataagatatataggaataagtacatcaagaagtatgcaaaacctaaaggaggaaagctttaaaacattcttgaaagacacaaaagtagatttgaacaaatggaaagatatcctttgtagcctaacaattttaattcgcccctagttaatatgtaaatttaatgtgatcctaataaaaatactgaattttggcctggtgcagtggatcacacctgtaatccaagcactttgggagctgaggtgggtgcatcacttgaggtcaggagttcgagaccygcctggccaacctagtgaaaccccatctctactaaaaatacaaaaaattagccaggcgtggtggagtgtgcttgtaatcccagctacttgggaggctgaggtgggagaatcgyttgaacctgggaggtggaagttgctgtgagcyragatcatgccactgcactccagcctgggtgacagagcaagacttcatctcaaaaacaacaacaacaacaacaacaaaactgaagtttttgtttattttcctggagctagacaagttgtcacaggttaggttctctgggaagcatatgctgagacagtgataagtgtacaagagcttagttagggwatactcttgggaacaacagtttggggaaggcagggaatcaggattgggcaaagggagatgtcaagctgtgatgcagcctcagtggaaacctcaggtaagcctgtggggaattcttaagatggaataacccttccgagttagtcgtccccatttggcacgagaggtataggcctttatatctctccatcagttggtcattggatgaaggccaccagaggaartaaggatccaatcttgggtaaggtggttcttttcacccaagcttgtctacctgcarcatttccacaactgaggtaattacatcccctttattcytgaagggtgatctgagtagtatgttacagtgtctaccacagtccactcgttgcaccatgtatttctgttgctgaattaaaaaattagctttaaatttagcagcttaaaacagcagggctgggcatggtggctcacgctcgtaatcccagcactttgggaggcygaggctagtggatcatttgaggtcaggagttcaagaccagcctggccaacatggtgaaaccccatctctactaaaaatacaaaaaaaattaggcagtagtgatgtgcaactgtaatcccagctacttgggaggctgaggcaggagaatcacttgagcctgggaggcagaggttgtggtgaactgaggttgcatcactgcactccagcctgggcgacagartgagaccctgtctcaaaaaaacaaacaaaaaaagactgaaaagatgccatttcaggaagacctaaagagtgtgagaaagcaagcaatgtggatacctggggaagagcatttttgtatgaggtaaggatccagtttcattcctgtgaatgtgaatatccagttttcccaacactttattaaagagactgtcctttccctgttgtgtgttcttggcacttttgccaaaaatcaattgaccrtacatacttgggagtcttaggtttatttctgggcttcctaacttgttccattggttgatgtgtctatttttatgccagtaccatgctgttttgattacagtagctttgtaatatattttgcaatcacagtgtgcaatgagtccacctttggattttttgctcatgattgctttggctattcagagtcatttctggatccatacaaattttaggattgttctttttttgtttgtttgtttttgtttttgtttttgagacagagccttgctctgttgcctgggctggagtgcagtggcacaatcatagctcactgtagccttgaaaaccttgtactgacctcaactgatcctcccacctctgcttcctaaagtgctgggattacagatgtgagctgctgtgtctggccgtattgttttttatgtatctgtaaagaaatgatataggaattttgataggaattgtattgaatctgtagatcactttaggtgatatggacattttaacaatttaattcttccaatcagtgaatatgggatgtctttccacttatttatgtcttcagtttctttcattagtgttttagtttttagtgcatagatctttcacctccttggttaaagttacaactatttcatttcttgatgttactgtaaatatgatctctcaattttgggggggattgttcattgttagtgtatagaaatgctatggacttytgtatgctgacatcgtaacctgcaactttgcagaatttatcaccagtttattactagattttttggtggagtctttaaagttttctctctatgagatcatgtcatcagcaaacagacattctcatttctttttctatatagatgtcttttatttctttttcttgccttattgctctgactagaacttycagtactatgttgaatagaagtggcragagtgggcgttcttgtcttgtttctaatcttagaggaaaarcttttcagttttcaccactgagtatgatgttagctgtgggtatatgacctttattatgctggggtacattttttccataccttatttttcaggggtagtttttatcatgaaaggatgttgaattttgtcatatgttttttctgcatctatcaaaataatcatgtggcttttgtctttaatttgcttaatgtgtattatttttattgatttatgtacrtcaaactactcttgcatctctgggataaatctcacttgatcatggtgagtgatctttttactatgctsttggatttggttcactaatattttattaaggatttttgcattttttttcatcagggctgttggcctgtagtttcctttrtttatttttttgtagtgtctttktctgccttcgaaatcagggtaaatactggctttctaaaatgagtttggaagtattaccttctcttcaatttttttgaaaagtttaaggattggttgctgttctttatatgtttggtagaactcagcggtgaagccatgaggtcctggtctgtctgtctttttttttttttttgagaccaactcttgctctgttgcccaggctggagtgcagtggcgcratctcggctcatkgcaacctccatctcctgggttcaagtgattctcctgcctcagcctgttgagtagctgggattataggcccatgccaccacacccagctaatttttgtatttttaatagagacagggtttcaccatgttgtccaggctggtcttgaactcctgacctgacctcaggtgatccacctgccttagcttcccaaagtgctgagattacaggcatgagccactgcgcccagtgcctygtctttctttgataagatactttttattgaatcagtttccttaattattattggcctattcagattttcatkacttccttactccagcttttgtaggctgcatgtttctagtaatatcttcatttcttctaggttatccaatttattggaacatagtcgtgattagtagtctctttttcttcgatgtcagttgtaatgtctcctctttaattctgattttgttggcatcttctctttttctttgttartctagctaaaggtttgtctatttgtttatctttaaaaaaaaactttggtttcattgattactgatttctagtttcatgttagtgtggtcacawaagatacttcgtatgatttcagtgttcttaaatttgttaagacttgttttgtggcctaacatgctctatcctggagaatgttccatawgcactgagaataatgtatattctgttactgttgtatggaatattctataaatatctggtagggccatttggtctaaagtgtagttcaaatccagtgtttcctcattgatttttttttttctgtctaggtgatctaatgttgaaagtggagtattgaagtcttattgtattgcaatttatctctctcttcaaagctattgatatttgctttatatatttaccttttcagaagttgggtgcatatatatatttagtttttgtaacttcttgrtaaattgacccccttatcattttaaatgaccttctttatctctttttacatgtttgacttaaagtctrttttgtctgacatatggatagctacccctgctcttttggtttctagttgcatagaacatctttttctrtcttttcagtctgtgtgtgtccttagaggtgaagcaagtcttttataagcagcatatagttaggtcttattttttaatccattcgccacttttaatccaatccacttttgattggataatttaatccatttgcattcaaagtaatcattgataggtaaggacttactattgccattctgttaattgctttttttgttaatctgtaattcgtttgttctctcctcctctcttgctgttttcctttrtggtttgatgatttttttatagtggtatgccttgaatcttttatcttttctgcaactactaaaggtttttgctttgtagttaccatgagacctacatacatcttgtgttagtagcaggctgttttcagctgatactgacttaactttgatcacttgcataaatgctatacttttacttgcctccccaccccaatttgtttttaaggacatgtcttatatcttgtatagtttgtatagtgtattatagctatagttatttatttttaatattttgtcttttaactttcctattagatatataattgatatttacaccaccagtacagtataatagtgttctgagtttgtatgcttacttttactagtgagttttatgttttctaatttatttatttatttatgtttgagatggagtcttactctatcacccaggctggagtgcagtggcacgatsttggctcactgcaacgtccgcctcccaagttcaagtgattctcttgactcggcttcccgagtagctgggattacaggtgcrcaccagcacacccagctaatttttgtacttttttagtagagatgaggtttcaccaygttggccaggctggtctcgaayttctggcctcaagtgatccaccygcttcrgcctcccaagttgttgggattacaggtgtaagcccctgcacccagccgttttcatatgtttttaatattgctagttggcagcatttttcttcagcttgaaggatcsttttagcatttctcataaggcagatctagtggtgataaatttccttacgttttgtctgagaaagtttttatttccccttttatttttgaagaacaggatcactggatatagtatttttggttgacaattctttttcttccttttctttcagctttttgaatctaacattccactcctttctggcctacaaggtttctgttgaaaattttgcctataatttaytggaagttcccttgtttgtaacaactcacttttcccttgcagctttcaatattttctctgtctttaacttttgacaatttgataataaygtcttttggtgtgtgagtctcttcggattcctcctatcaagttttcattgaacttcctggatctggctgggtgttttttttttttttttygctttgtttttcttttttttctttctctctctctctttctgtccttctttctttctttcatcataagcaagctaacaggagggatctggctttctgtttccttccccagacttggaaagtgttctgccactttttctttgaattttttttgtccctttttctctttcttctccttctggtactctgataatgtgtgtaattctgcttggtggtatcctatgagtcccttagaytgtcttcactctttttcattcttttytctttttgttcctcagattggatgatttccattgaactgtcttcaagtttgctaatcctttcttctgcttgatctagtctgctgttggacccctctaytgaatttttttagtttggctattgtgttcttcaggtcaatgatttctgtttgatattttaaaaatattttctacctctttgttgatattctcaatttgttcatgcatcgcactccttacctcagtgagcatctttatgactccttctaaatgtcctgttaggtaaatcacatatcttcmtttcagtagggttggcttctaattgagattgtcttgttcttttttttttttttttggagcatatttccctatttcttcatttttcttaacttaaggcacatagaatgctgtcccttctgtttaggcttcaggaggtttattctttatttgctacataggctcctagatactggcttgttagaagccaaatctgcagggagttgctggaaaggctgccaagattttggcttgaggaactagaataatggagttgctgtttactcagatggtgagtattactagaaggagtaattcttcatttttcttaactctgtattggtttctgtgtattatataaaagaactaccttctctagtcttgttagactggtcttatgtaccaggtgtttcttcccaatcagccttggcagtattctagtttcgcaaaactttgtgcttgtccagcctgctgtctctgttcttagtggcctccaagaaattagagtcaagttgtactattgccttgagagaggtggtatagaagccattcccttgggatatgactagagatattgggatgttagatgtgtgctttggtttcttctttccttgcagagaagctgaaagccagagtttatctcccactgattctgctctgcaccaaagagagcrtctgaggcagatgcctgtattcttgatctaactggtgactttttaacttggaagagagagatagctgctgaatatttatttgcaagtttaaaagtcacctgtttgttctctgtggtctaggagactcaggagtgtagggcttcatcaamtcccagagctaggtgatttagcagcctatccctccagtgaaggctataaaagttggggttctygatgtgttcaaaaattattttcatggagagttgaagacctggaattattgccagagcctgtaggggaaaaggtgcaggaagcccactctactttttgggccagcaggtctcatgcycccctagcagggggagacttctgatctgaagctattactgaagcatgccaggagaaaggcacagggagtgctgactttccttttcaggaatggggaggtcccccgcctccttccattgagrgattgtgggagtttgtctctagagcacatggaggcagaaggcatgagaagtgctgtcccttccattcgtggtggcagagatttcagagttgggattgtgtctggagcaagccagggaaggaggtgcagagtgtgcttactctcccgttcaagcaagaagtctcacatgcaccttgcaggrgtaaccttttggtctggagttccctgaagcaagccagggaagaagacacagggamtatccccttctctttcttgtcatggagaggtccccttgcctccttctaatgagaggttgcagaaacttatctcaggagcaagycagggaagaaagcgcagagggtgctgttcctcctgttcttgctggcagaggcctccaacctttttccaaggagasagtggatggctgggattagcgcctgaagtaagccaggggaagaaggcacatagagtgctgtcccttctgtttaggctcaaggaggtttattctttatttgctacatgggttcccagatactggcttgttagaggccagagcctcagggagttgctggaaaagctgccaagatttttggcttgaggaactagaataatggagttgcwttttactcagatggtragaatttctagaaggaggaggtgcagttttggatatgttaattttgagrtacctatgaatgccttgtccaggaagagataatccaggaagcaggtgggtatacaggccagaagcttaagggaggtgtccaggctgagaacttgcagtccccagatgtgccatgctgttttaaggttctttgtttatgcacatcctgccccactgcctctaaatctccctcaaacacttctagtcatacccattttacatattaccaaaagtcagagttgatcaccctctcctctatgttgccaatctacctatttttgccttcttctctgtaatatagatattgtttacttaaccatattaattaggtgtctactatgtattataccactgttccaagcactaaggataagatgatgcaaaattctgatccttatggtrggaggcgcagacaataagcagataacattcagggataagtgccataaaagaatgtaaaacagtacgttggggtagakgttgcatactgagcactactttagcaagcctggccaggaatggtctctctgcttaggtgtgatatgtgagagagacttgaatgcggcgaaagagtgagccgtcataagatctggaggarcaataatacaggcagagaggacagcaaatataaagaccttgaggccgggcatggtggctcacacctataatcttaacactgggagtctgaggtgggtggatggcttgagcccaggaattccagcccaacctgggaaacatagtgagaccttgtctctacttaaaaaaaaaaaagaaagaaraaaaaaattagccaggtgtggtggtacatctgtggtcccagctacttgggaggctgaggtacaaagatcacctgagcccaggagttcgaggctgcagtgagccaggttcgtgccactgcactccagcctgggtaacagagcaagactctgtctcaaaaaagaaaaaaaaaaagataaagaccggccaggcacggtggttcatgcctctaatcccagcactttgggaggccaaggcaggcgggtcacctgaggtcaggagttcgaaaccagcctggccaacatggtgaaaccctgtctctactaaaaatacaaaaattagccaggcgtggtggtggacacctgtaatcccagctacttggggggctgaggcaggagaatcacttgaacccaggaggcagaggttgcagtgagccaaaaytgcaccattgcactccagcctgggtgacagagtgagactctgtctcaaaaaataaaaaaaaaataaagatcttgagacatagggagcatggtatgttcccagcaaggccagtgtggccagaggagcataatagaagaggtcagagagataggccagaggccaggttatggagggccttgtggagsttgctgcagagtttataaactctaagggtgatgggaagccacagsaaggttttgaggagggattgataygatctgatctgttttaaatagataactgtagttgctgtatggamatagaagtagaagcagggagactattgcaatagtgtaggcaagaggtaggtggtgacaaatggaaaaatgaattgtttgatggggaacaagaaaagggaggaaggagaataaaacctagattttggcatgggcaatstgcaagtcctattgaattactgtcttcctgtaatgtgtagaataggaaaatccagcttttttaccatggttaaaatgtcctgcatgactgtcccttgtttacctccatcctcgttctctgccaccctcccccttctacattaaacgtcagcccaactggtgttttttagttcacacaactgcccaggctttttattgccttatccaaatgcacacttcctccatcctaaaatattactgcctcagaggcctccatcygctagcctcactattacagttctctggmttttctttgtagcactgactacaactcgtactaaacwtacraatatttaatttgtttccttcaatagatttttaagttccagagggataggggagttctttttctgtccattttycccccatagcctacccagtgcctgacacatagtggatgctcagttcttatttgttgaataaatgggtgcatgagagaaytctcattaataagataacattaggaggctggaagacattcaagtagttctaaatgctttctctgtcacccagtctggagtgcaatggcatgatctagctcattgctgtcattttaaattctgaaccttataggtgccacrangataggaagtattccttcttattcaccaccatgtcactggtgcccaacacaatgacactttgagagcaccccataactataatatgagtttactaactttgttctttctttcaaggttaatctgaagcgaccttgtcctttctgggcagaagatggccactgttcaataaaagactgtcatgtggagccctgtccagaggtataataaataaaataacagggcaaagccaattttctcttggacttttagaaaagcataacctctattttatttcaggctaatgtcaatggatttggatgtgtcagcaaattcatatgctctcagctctctcctttagaaccagattattgaagattctatacytgacaccaaaatgggtttgaagacacttgtatccagtgatactggtgatcaaatatggaaatatagtcttattctaaaatggaaggaaaatcagaggcctgttctaggattggatctgcagttgtcttttatttcaygctttattgaatcagcatcttgtttcataggaaaaaaaaaacaaaataaaaacaagctactggaccctatatttcaaatttatagtgatttaattggggaaatttcaggcttagaattagattttcacttggccttgttacatttacatttaaaaaaaaaacctatacttaataccaagagaatgctacattttagactttgatttttgttatctaacataattaattatattcctctycttcaacagtaattagttgtaagctttgttttcctttcactttctgcttttcttacctaatcagttagtctagtttgttgtccttaaaaatctgtaccaatgtcyttcctaaagggaacattctttaaaaatttataatattcagtttcctttaagaataaaatatgtattaagtatttygtttaaagttctgtttgataaacyggttgtaataattcagatacatttattaaagcctaacactaattattggccttgtgaaaaagaatgttccagctacatgcasttctcccattggtaaaccctagattagattggtaaactctaggttaatcgtgtgggccaaaaaaagctttctagtaatccaaaattgcctwcactttgttagagcagaagttaaaattgcacataatacattgcaaataattttgaactttcaaaactttcttttctatggtaacaaagtttgtggaaggaagtgattgtcagtgttttcaacctaaattatataaactrtaaaaaatactgcaatagttattagagctgcttttggctttcttactttgtgtatgtcattcagttttctatactttgatttataagtctgtatattgggataacacttttactttatgagatagtgtgaaaacacaatttgagtgagtgtatatttgcccctcatagagtaaaatgcttgatgaaatagagcaatgcattgacaattcgtgaagaaattcyaaaaaaaataaagatcacttaaaaatttttttgcttttcttgtttttttaagagtaaaattccggttggaataaaagctgggcattctaataaggtragtccctcctcttccttgagtgtttctgctttacattgtgaaacttaccatttactgactgacagtggctgtagtaaagaaccatattatggttagttgggaatggagacattttgcctcagaattccaaatccctaactcttgcgtcaagcagatagattgtacatttctagattcttttgaaattgcttcagtactgtttttggaatctctggaacaactattaaatgtaactatagtgtcagatcccctagtcagcaggtgttttatcacatagctatttttagtcttctgtttcaactagttagcctggcaggttcagaattatattgtatagagtaaataattatcaagmtattttgagcagagtactttcagatggtattaagatattcatttttaatkattgttcttgtcctyttatgagagtattatattttgccattgataygttttwagagaaccgtttatttcctgtttttyactactgcgcatccataataaagatcatcataccctctctctctgtctccttcttgtgcctcctttgcgttttcttcttgctctctctcccgtgtaatcttttgtttttactttattgtatttatttttgcttcagatctgaaataaataaaaccatataaaagcagttgaaaccccctcagccatttcccagttcgttctaattccttcctcccagagctaaccatttttctgaagtatcctgtgattttatattcttattgcaggtgtatctacaagtaatatattttacacttttattgcatgtgtatccacaagtaatrtgtaatttattgtgtgtaaattttttttaatttaaataataatatttttctatttctttaggttacaaacttttttcagtttgtgcttttactcagtcttacacttttgaaattttctctgttggtatatgtggattttgctcatcatcttaatagctgtagtcagttgtatgactataacacatattagccattcctctattgatggacatttcagttgttcccaatttttggctatttcaaayagtaatgcactagcatttttgtcctttgtctcattgtgcacacaygtaagagtttctctaggtctacctgtaaaggcaggattgctgaaccataaggcatgcctatctcaacattagaaataatamcaaataattttccaaggcagttgtacctttttaaaaaaatggttgccctgggatgtggtctcactagtgggactgcaggttcaaaggtttaagcattttgcaaacgtgtgtgtgtatgtgtgtgtgtgtatatatatgtacgtatgtatatatatgtgtgtgtatatataacttttatataaaaaccctctttagaactaaatttgaccatatatatatatatatgtttgcacacacacatgtttgctatayatatatggtcaaatttacttcccaagagggttgttttttcagttgatatcaccaacacatcagtgctaattgttaacttttacttttgaatttttatttatttttttgagagagagtcttgctctgtcatgcaggctggagtgcagtggcgtgatctcagctcacttcaacctctacctcccaggttcaagcaattctcctgcctcagcctctcccgagtagctgggattacaggcgtgtgccaccacacttggataatttttgtatttttagtagagacggggtttcaccatgttgaccaggctggtcttgaactcctgacctcaagtgatccgcccgccttggcctcccaaagtgctgattacagacgtgagccactgcacccagcctaattgttaaattttaatatgttgttgatggaaataatatttarttggtggaaatttctgcctcattttcatttgtatttcttacatatgatagggatttttatartggaatgtatgtatatttagtntatatcattgttgacagattgattattctgccaatagaaactgaaataaagaataaggtaataatttttactaaacttangaacttctttgcagtacttgaaaatggcaaacaataccaaagaattagaagwttgtgagcaagctaataaactgggagcaattaacagcacattaaggcaagttttattttggtaatattaagaaaatattctcnttgatatcaagaatcaattttttatgattttggtaaaacattttcgaacccattaaagttttaactaatatatttttaaaaggaagaaaaagtttttctttatcctaaatttcataatagctttgcctcttcttggctgatttatccttaaatttctagaatgtatcatccatagtaaatcttttaaaaagtagaaatttacaagattgttcagctaacagggtttatggatcaatttttcctgattactatggaagaaggggcttgaactcctaaatctttttaaatagtgattgagtctggatgttacattttgaatgataaaagttattagcytgttaaatttygtagattttttttctgttaacttttccttatttgttctacacagaaaccagcataaacaatatataaatggcctcaaattgtgtagtataaaatgactagacataatcagtagttgggaatgagatatttcagaaattcctttacattcccatttgattaggtttgtatttatgagccgggcatggtggctcatgcctgtaatcccagcactttgggaggctgaagtgggcagatcacctgaggccaggagtttargactagcctggccaacatggtgaaaccccatctctactaaaaatacaaaaattagccgggtgtggtggcgggtgcctataatcccagctacctgagaggctgaggcaggagaattgcttgaacctgggargcggaggttgcagtgagctgagatcacaccrttgcactctaacctgggtgacaagagtgagactctgtctcaaaaaaaaaaaaaaaagatttgtatttatgtaccataattgctaatgactcagtataagttagcaattttatttattgaagacaaaatttaatataggaaaataaaagataataaacacccacatacatatcctccatttcaaataaataatcctccattccaagtaaataaatattaacattttttgccatatgttttaaggaacaagaaacatcacagataaatttaaaatcccttatgctgtattccctaatccagtagaggtaactactatcaagaattwgttggtgtatatccagtctgtttttgtttttatatatttatatgtataaataagatagttttattttgtgtatatggttttatttttcctttgtataaatgatatcctatatttaacattctgcwacwtttttcattgtacattttgctttctagatctgtccatgttgaaacacagatttattcttttaactgatgaatgattttcatcatataaatatcccatattttacttagctattcacttrttgatggatgtttagctatttccaattatttacttttacaaacatgcyrccttgagcattcccaaattttttttcacattagaagtagaattgttgaatcttaggattgtctttttaatacccattcttgatattgcctgatgacattccatagtacttggtgtgaatatatactgactccagtgctgacagcttgtatcattctctacatccttaccaaaagttgataatgtttgttgagtgtgaaatagtaccttgtttttattttatacttcgtaattactagtggatttgagcattttttatttattggacatttgagtttcttattcattcaacaaatgaatgtctacaatgtgccaagcactgttctagggtactaggaatccagtagcgtaatggataaaatttccgccctcgtgcaacttgatccttgtcagaggaaataacacaataaacaagtaaaatatatgagaaataagtaagtaaaatgatgatgaatgctagggaagacaggcagggaagaacaaagagggctaggagtgagagagtggcactgttttaaattgggtggtcagagaagacctaagtgataatacaacatttgaacaaattgccraagaaggtgaaggcatgagtcttactatggttggctgggggatgagcattccaggtatatataaatgttagttgaaaacccccatggcaggatcatgcctagacttaaacacaataagaccaatgtaactgcagcacagtcatcaagggcaaagtagcagaagacaaggtcaaaagatgctagggatggggcaggaggtggggtgggtagagatcttgtagagccttgaaagcaattataatgagtgtttgctcttagactgggtggaataaaactcacagggaggttttgaacagaggagttaagggcatgtgttgagggagcctgatatgttgcagaagccttattacgtgattatcgtagtaatccaaataagacattatggtgatttaaaccagggtgatagcagtggaaatgatgagaagcggtcaggttctggatgtattttgaagataaagctaacaggatttgctgcagtattggatatgtggtattgagaagatatgagcttttggatgactacaagatttggaattataaaaatggagttgccatttactgacctgtggacagctggaggaggagcaagtctgakacaaagttatagtcaaatttggatttgttaagtttgagctgcctgtgagacatccacttggagatttcaggtaggcagttggatatacaaatctgaaataggggagaggtctggatgtcagtcaatgaatagatggtgtttagcagccataaacctaaatgagatcaccaaggagagagtgtaaatagaggaatgatctagggactaggcttaagtcattggaagattttggggtaaattgccagtttatattctttgtcatttttttctccattgggttggattttaaaattattactgatttgtaagcattctttatataatgtgataattctttgttggctgtgwtgttaggatttgtcctttaattttgcatatagttttttgttgttgaacagaaattattctttaaacttaaaaaatttaagtataatacacatatggtggaatagaaaattcttaagtgtaaaggtcaatgtaactttacaaagtgaacccaactctatagccaccatccagagcattatacttgctgtccagattaccatgtgtactttcctagtcattatcaccttccaaagttaaccgtgattttgagatactgacagagattagttttaactgtttataaatagaatgatatagaacatattctgttgtatctggcttctttttgttaacatgtgtctgagattcattcatgtttttgggcatagtaatgtttaattcttttttattggcacatagtattctatagtaagaatgtgccatgtttccattctgctcttgatagcttatgctttggggccatttcagaaatattttggtggatacagttggacatggtggctcatgcctgtaatcccagtactttgggaggccaagggaggaggattggttgaagccaggagttcaaaatcagcctggccaacaagtgagatcctgtctctacaaaaaattaaaaaaaaaaatagccaggtgcagtggcatgrgcctatagtcccagttacttgagwggctgaggcaggaggatcactttgagttcatgagtttgagactgcaatgagctatgattgtgccactgtactccccagcctgagtgacaaagtgagacactatctgtgaaaaaataaaaaamaaatttggtacatacatatgtatatttttatggagaatatacctagaaatgagattaggtactgccaaattgttttctaaaattgctaccaaattatattgctactagtagtgtatcagttatctgttctacaacttctccagtgattggtactatgatttttaaacagctttactttgaggtataatgaaataygatacactgcatataaagtatacagtttgatgttttgacatgtgtccacccatataacatcatcacaattaagataccataggytgggtgttgtgtctcatgcctgtaatcctagcactttgggaggccgmggcagggggatcatgtgaggccaggagttcaagaccaacctggccaacatggtgaaaatactacttaaatactactaaaaataaaaaaattagccaggcgtggtggcagacgcctgtaatcccagctactcaggagggtgaggcaggagaatcacttgaacccaggaggtggaggttgcggtgagccaagatcgtgccactacactccagcctgggtgacagagtaaaactgtgtctcaaaaaaaaaaaaaaatatatatatatatatatatacacacatacacacatatatatatatacgtgtatatatatacacatatatatatacgtgtgtatatatatacgtatatatatacgtgtatgtatatatatatatatatatatatattttgactgggcatggtgactcacacctgtactcccagcactttgggaggccaagacaagcagatcacttgagcccaggagtttgagaccagcctgggcaacatagcaagaccctgtctgtacaaaaaaataaataaataaattagctggatgtgttggcgtatgtctatagttcgagctacttgggaggctgaggatagaaggatcacttgatcccagaaggtcaaggctacagtgaactatgatgtcagtgcactccagcctgggtgcagtgagaccctgtctcaaaaaatatatgtatatatttatcactcccagaaagtttctcattccctattccatcttttatgctcctcatttcccagtttgaagactactactttaaccttgggacactatcttgaaaggaagtgctgagttaagtccaagaaattctcatgcaaatagtgttgcatccatcttcaaactgacatttggaaaagctgaagtagataacctctaaggtcccttctaactcatttataaatcaaactgagccagctttattagcattagatgcacattcaatgttttttcgggcttaggcatggctttactgtggttttaggcaggggttaggtgaaagaatcagcaaagcctcttcaaatgaggatgctcaaagaagaaatttcctgaaagtcatattgttaacaagaaaataggaatttgtatcactattgatttgttcttcactactttcaacataagatctatcttattaaacacaagtttagttaacgtcattttagctgtaattaggcattattgtttatggcatcacgtatttcagttgggtcaactgtgatacaatatttttgttaatttttattatatactcccatagggaaaaaaattccacagtaagttgaactggaaaaatgtattgataaagttgatgtagtacagccaagcttatacacttctttgtagtggcttctcaaatacaaaacaaattcttgattatgacagtaccacatttaggaattacctgatttttacctttatatacctgatttatacagttttttgtaccttgttttttccttttgtgttatgaataaagagggtagcaaaatgatgcctctctgatagatmctaccatcatgagtattcaatacagagaaggcctgaatataggttcaagttaatgtagatcaaagttgatttcaaggaatgtagttgttacttatcagttcttcaagttagaaatcttgatcatagattttgttaaatgttaactaggctgtgaaacgartgatacaccatgataaaagtggcattgttgtaaccagtgaataccacattggatgggagattatagaaatacagttattggtattttagatcttgtaagtatagacacaatttaaattaaaagaattctgaaaataaatttaattacttcggaaaaaatacrtttaacgttataatttctaagttaattgaaaagtttagcttgagttttgtgtttaactacatgttatatgtatttacaaattaatttctccttgaaataattattattgactagtcctaataattcagtatagttaagaaatataaattactcaaggaaattaatacatatattttcctataacttgttttttgtcatyccttcatgtaatcactaatagcagaattgtgacatcatctaatctttaactgacctcagattatctattttaattacactagaatacagtattaaaagtttcagctccaaatttaataatttttcttttttattcctccttcccatagtaatcaaagcaaagaagctttcattgactgggcaagatatgatgattcacgggatcacttttgtgaacttgatggtaatacaataaactattataattaaattattttaactttaacccttttataagacattttaatcaatgaaaatataaactgaattatagcttcagtactggattttgctatgtagaccttattattcrtaatggcatttattgagagcctgtgttccaggccctrtgttaagtgccttaaatacattatttctggtctttgcagctaccttcataagtgtgtattatttcatatctgagaaaactgagtctgaaaaagactaaataacttgcccaagatcacacaatagcaagaggctgaggcaggatttgatcccatatccgaatccaaaacctgtattctttccattatgatataccatctgccatggaccttcaattgaagccacttagttataggtctgtgaacattttgtaaaaatatttacactggaatttgctagaggtcttaacaaactcatgtaaagatgctttctaatgctggggaggactctaattcgacttctccacagccctttttccaagagtcccctggaatggtagaaagactggacactctccaccagagtaactaccacttctcttaacagaaggtaattgcagtgactcaaaattttttatctgtgggataatattcccaaagaattgtgctgagtaggcataaatcattcatttagtttctcttcacctttttccttggtattgttatatttttcacagtggaaaagaatttggggattaagtgtgcatagttggaaatagtagttctttggaactcttcaagtatctagaatgmtctgctttytaaagttttaaaaaagattcacgggtagaattgtgctataaatccagcccatagtggagtaagttagagtgagcttctacgatagtatggtaaactgagaataatactgggagatggaatgttatcttggcttatatggtttcagtaaggaaattttaaaggaatctgagtgaggttatactaaggggtaattaatgaagtatctgtcctctctatgatatagagaattggtaaaacttttatcaaagcaagccattgaacctctcctttcacatttgctctttggttgccatttatatttgagtgcttaacactcatagtcatttatttctaaattgtccatttacctattctttgattaaagtataaataatagtgcttatttaataggttttcaaattaataatttgtgtgactatrtattactcttatggtaaataggtatttaataaaaatacttaattgcaggaagtacttgctataaataaattgatatgtagattacctgccatcagtataaacagtgttaacgatttttttttttttttgagacagagtctcgctgtgtcgcccaggctggagtgcagtggcacaatctcggctcactgcaagctccrccccccaggttcacgccattctcctgcctcagcctcccgagtagctgggactacaggtgcccaccaccacgcccagctaattttttgtatatttagtagagacggggtttcaccatgttagccaggatggtcttgatctcctgacctcgtgatccacctgcctcagcctcccaaagtgctgggattacaggcttgagccactgcacctggccgtgttaactattttttaaaatattagtttcttaaattgtagaaagtaagaaatattttttaagaatttacatgaaatcatcccctkaagattttcaagattatatttaaaatcaattatttttatattcttataaaaccatggtacctactaattggtttaccatgactcttctgagttgtaatgttcatatatattccaatggtttatatgcagtttgtttttgwtttgttttgttttgagatggagtctcactctgttgcccaggctggagtgcaatggcacaatcttggctcactgcaacctgtctcctaggttcaagcaattctgcctcagcctccctagtggctgggattacaggcrtgcaccaccatgcacagctaatttttttttttatttttagtagagacagggtttcgccatgttggccaggttggtctcraactcctgacctcaggtgatccgtctgccttggcctcccacagtgctgggattacagccatcagccaccgtgcctggcctatagtagtttttaaaattactgtcagkgtagctttagaatcattgtttagttattgctgtttcccaaattcagtggattaaaacaaaaatataaagaatattcacccagtttactagggaatatgtccatttcctgctgttttgctgttgataatgacttcatttgaatrgaagatgatycctatagatcaaatagtagtttttaaaataatttagtaatttaatatcctttaaggtaaactgctttccctaccactcttttttgttgttgttgttactgtctttatcatggcttgcttcttgttcatgtttctcctcaaatgtcactttatcagaaaagcctgctctcatctcgctgtgtaagatagtagccactatcactccctgtccctttgctttgatggcccccaccctgcccaagcactaacaactgtctgacagtatatggcatattattgagtgtatcggtttcttgtcagtcttccccagctagattgtgagctatttgagggcaagggctttgtttttggttcactaatgtatccctagtgcctagaatggtgcctggacgtggtagatgcttagtaaatacttgctgaatgaactagttggttcataaaaagcctaaatagcatgatagatttttagttttattttttcccttaaaatatgttcattaataaatttaatgtttaaaacagtagtttctaaatctggttgtgtatcaaaattttttgagagctttataaactgtagcttctccttgactgtaaatcatgttttaatagtgagttagtagcagtttggggtagggttggtgatggagggctttaagcttaatcctgagtctataatacagtatttttttatctgtgaccgtagcaaagagcttgcacactaagttgttctgtatgctaccattaatgtttaagagatatatgagttaggaagtagggaggaaagtttaacatcctagaaaatgtggtatgacctcataactctattaaattaggacagtggaaaggaaattcagttagaaaaaaatcgtatacttaaggccaggcacggtggcccatgcctgtaatcccagcactttgggaggctgaggcaggtgaatcacctgaagttaggagtttgagactggcttggccaacatggcaaaaccctgcctctactaataatacaaaaactagccaggcgtggtggtacatgtctgtagtcccagctacatgggaggctgaggcaggagarttgcttgaacccgacaggcagaggttgcattgagctgagaccatgccattgcactccccactgctcaacagagtcagcctcatcgcaaaaaaaaaaaaaatatatatatatatatatacacacacacacacatatacacatatatatacatatatatatacacatatatatacacatatatatatacatatatatacacatatatatatacatatatatacacatatatatatacatatatatacacatatatatatacacacatatatatatatatatacttgaagaggaggaaataacactagttcaacttcatgaattccaagaataaggaattatgaagctgctttgtagaggcagaaagaagataaaacttttgtgggagagggtcatagtagagggccagataatttagagagaattatctgaatgaatgacgcagctgtgcaaactgagacaagtttcagttgaacaaatgaaaatcagtgtcacagatggcccagggataaggatgggcactaccagctagtgtgtttgtagagaacttggcctgtagatgctttctgccacacacgttgctcactctggatgtcccatgaaattcttgtcagtatagagcagaggttggtaagctttttaagaaaatggactaatggtaactattttaggctttatagactgactatagggtctctgttggaattactcatctctgccataatagtgtgaaagcagtatgtaaacaaatgaacatggctgtgttccatgaaaactttatttacaaaaataagcagcaggccagatttggcacacaagctgtagtttgcaaactccttgtataggttaacaaaacccactcttttcatgatttgaaaaagtattacaagatttttttaaaaagtattgattaaactaagggaataaacattaagaacattgaaaatgtaagttttacttaagtagttataaaacctgatgtaattgagctgtgtgtcgtggtgagcacctggagtcccagctacttgggaggctgaggcaggaggcttgcttgagctcaggagttcgagtccagcctgcacaacaaagtaagaccacttttcttaaaaaagaacaatgaaaaacctgatataattgattttcctcttgtgattttttagctcccttaaagtatattttaaatcatcatggtttaatatctgaatcatggtttttcttctttattggttatttggttggttttcttgggaaaagaggttggtactagtccaatttgcacgtttgtagaggattctatacacatgtagtcctacatgtacacacacatacacaaattatttataaatatataatatatatgtgtcagagaacataaattaatgttatattgtgaagcttatatataattcagttttgcagatgaatttattcaagagcagcttatggagattaaaactatacaacttagaaattaaatactgaattttaagattttttttctttcctaaaagccatactttcttttttttttaaaaaaaaaaaaaaaaaggctgttgcccagggtggagtgtagtggtgccatcatagttcactgcagcctcygactcctgggctcaagtgatcctcccacttcagcctcccaagcaactgggactagaggcatgtgccaccatgcccatatcaaaagccatacttatacttcataatttgaatttttattttaaattaagattttaaaagttattgtttttgagccctgagtcaatctgtgttcttggacagttttttctatccatctgtaaattgttttccttgccttgctttttatagtggagtatctttacaaatttagagctagaaatagagccagtattcttatagtctgcaaaatcatgtttccattgtctaagttatatacaacccatttaatacagtaaattgttagttatccttgtattcttcctacatcatgaaagtgccaggcaggtggatcacctgagatcaggagtttgagaccagcctggctaagatggcataaccccgtctctactaaaaatacaaaaaaccaaccaggcatggtggcgagtgcctgtaatctcagctacttgggaggctgagacaggataattgcttgaacctgggaggcggaggttacagtgagttgagatctcacactgcactccagcctgagagacaaagcaagactctgtctcaaaaacaaaagtgycaggtaattcttggaaggcatggatcaagatgctgttttgcccttgtgatcatggataatcccagtctgtggtcattgactgtccagggaatactgtttactgacaggaaaatataccatcaggtaatgaaagagagacatttaatgaccacatttgactcctgttttaaaccagctgcctctgtactattgtttaaattcatgacaacaaacggtagtaagcatataaataaaggaatatacgtgtgccatatataacacttgagcatctatgtattatgagcatacatgtgtgaggcatggtcattataatttttctttagctatgaaaagcacgtttcccatttctattcagaatgtgagcttcaataattaagatttttaaaatcttttgtatttctcagagatctcaattaaaatgtccaaatagggccgggcacagtggctcacacctgtaatcccgccactttgggaggccgaggcaggtggatcacgaggtcaggagtttgagaccagcctggccaacatagtgaaaccccgtctttactaaaaatacaaaaagccagacatggtggtgcgcacctgtagtaccagctacttgggaggctgaggcaggagaatcgcttgaacctgggaggcggaggttgtggtgagctgagattgcgccactgcactccagcttargcaacagagtgagactccgtctcaaaaaaaaaaaaaaaaaaaaagtccaaatagtggagatcggggtaaatactcatttgggtttcaatatggaaaatggttatttagttttaaatatttcaacaagtttgtgaaagttgtgcctactatgttttagtttgagagcaaaaaaaacacttcaatatgttgacatcagtaaaaatagtaatatataacttttaaaaactagagcatggtatagctttatgaataatcagatttggatcacaaagttatggagccgtttacttcatgagtccaagcagagagtagcagggaaatctctatttttaatacaatatatgttacaaaatgtttccaagtgcgtggttaggtggatatattcttagagaagaaatcatatgaaatattaaagcaggttatgattctgtttggtcttttcaatcctgggtggttaaaacttaagaaatgattcatgtctctaataaggtgaaggggatgtwatattacttaaaagagcactgcgtatccaaaggaaatggaagagttgttttttcttctcttaaggaatttgtccaagttattacaaatcttgcrtcaagtacagtcacaagtatactaaccactataccatttaagttggagattacttgaaaagcatgacatttttcttacctttgagtagtccrgtttgctttktactgttaartcttagataaatggtgaaatatggatggtttttatgaattttttcttgttcagatgagagatctccagctgctcagtatgtagacctattgctgaacccagagcgttacactggctataaagggacctctgcatggagagtgtggaacagcatctatgaagagaactgtttcaagtaactggagggggtgggggaagaaggaacgactgatagagggtcgggagaggccgggtgctgtggctcacgcctgtaatcccagcactttgggaggccaaggtgggtggatcatctgaggtcaggagttcaagamcagcctggccaacatggtgaaaccccgtgtcaactaaaaatacaaaaaaattagccgggcatgatggcaggtgcctgtaatcccagctacttgggaggctgaggcaggagaatcacttgaacccgggaggcagaggttacaatgagcagagattgcgccactgtactccagcctgggtgactaagtgaaactctgtctcaaaaaaaaaagagggtggggaggggagtatttgtttctattggaataaaattatacactataaaagttaaaacattctatgtttgggtattatgctttctttttcaggcctcgatctgtttatcgtcctttaaatcctctggcgcctagccgaggtaggtttttcatatgtacattttcatgcttttcattgtttataaaatgtctttataactaaacttcatattgaaaaaactttcatttttatattttgtttaatttgaatgatgaacaaaaagtgtaagattagttcatagtcgagtctcragatctctaggcatgttgttttacataattactgtcatttattgaatgcctgctctgtgccagaccctaaactaggaagtttatgtaaaataattaaaatatgtgagtaatcaatatatatcaaagatttcctggggacttattaaaaaatctggttgctcaggccctacgctatattaattaagtcagaatccttggaatgagaacaccaggcattgttattttttaaactctccacatgattccagtatgcaaccaagtttgacagccagtgtctcgtaacagtgcttctagacttcagtgtgcatacacatcacccaggagccttggtaacatacagcttctgattctgtatttcttgggagaggtccaaacacactcctaggtgctgcctcaggtgccgactcatgtaccacactttcagtaggaaaaatgtacaacaattttagaaactttagcagtgctctatatctgtactgtccaataaagtaaccagtttccacatgggactgtggaacacatgaaatttggctagtgtgaaactgaattttaaattgtatttaatcttagtttatttagatgtaaaaactatattgttaaacagaaccttattgttttggtaagactactataacctatgcgtcatgtaacatatttttgttgtagtgtgtgtatacttttgaattttaaaaatgtggctattagaaacattttaagttaacactcgtgtgtggygttatatttcaatggaacagcattactgtcatcagtgggatacatcctcagtctgttctcagtgaggaaccaaaccctgggagcaactctgtcattgacctgccattccagtgttttctttagacggggagtgttttaagaaatttgatttcctgatctaaatttgtatctttagacctttctgagaaccaaatagacttggaagggttgactgcatagactgctttttcatgctcactctgtcacaatgtggcaaatacttgttttccccaaattcacattgaaactgcctggagaaggaagttggtcctgaaaaagacgtgcctggcttcttatcctttgtctcttttactacttttgcctcacaacttttctattttcaacttaaaggttttaattaaacaamattttataaaaattgaagcartatagtagttatataaagtgaaaagggaaagctcttctattccatagtacagagtttgaaaggtgttcttccagaccttttctacagccacttaatacttttaaagcagaaaatacaattttttcacttaagaaaaccatcaagtcctaagaarcacttcatttccatgttagtgatatatcagagacataacactgctgaaaagatgaggaaaaggaaactactacatagaaaaagaggaagggaagaggagaaaagaagaaaaatgaaatatgaaagaagacaagactaggtaaagagaatggttcctagctgttataggagtactctatgaagtaattaatagctcttgctgttgctatttacctgctatctccattgaaattggttgattaatagttctttaatcttcttaactctttcttccacatttctgagtcataacccctaggcttatacaactattttctaacaggttttgagcaataggaacttttgtccaaaaatgaaatcttatttcagaaccyacataataaagctgataggcagagctgctgtgttgccctagagcccaacctctggcctcttcctcacctctaggcctcctggaagcagcaccttgcccaagggtttcactgattacagtttgggatatactcttactaaggcctgtctctgctgaggagcagtaatttaaaagagaaaaatattccaggttggaaacagtaatgttcagagaggattgtgtgcataatgattaaaggagcaactttatgtagtaattaattaattattgaaaatagtggtctttatgactttttagttgctttctgatgttattgtattttaaaatgtgcaaatctttttttttttttcttgagacagagtcgcactctgtcactcaggctggagtgcagtggtgtgatctcggctcactgcaacctccgcctcctgggttcaagcakttctctgcctcagcctcctgagcagctgggatgacaaggtgccggtcaccacgcctggctaattttttgtatttttagtagagatggggtttcactatcttggccaggctgatcttgaactcctgacctggtgatcctcccaaagtgctgggattacaggcctgagccaccgtgcccagccttcttcttttttttttttttgagacggaattttgctcttgttgcccaggctggagtgcaatggcgcgatcttggctcactgaaacctccacctcctgggttcaagtgattctcctgcctcagcctcccaagtagctgggattacaggtacatgccaccatgcctggctaatttttgtatttttagttgagacagggtttcacatgttggccaggctggtctcaaactcctgacctcaggtgatccacccaccttggcctcccaaagtcctgggattaccgccgtgagccaccacrcctggccaaaatgtgcaaatcttatactctttgacctrtattctgattaagaggactcatttgcagggcgtctactcagtgaccaaggtttgtgatataattaatagtttaacagttttaatctcaaaaaatagtattgggatctgagctatgtaagacattttctaaaatcttttctattattttctcttttaggcgaagatgatggtgagcaaaactcatgtttgtttgtttcaagtgtggaggaaattttttgtaacaatcagaatttgatttttcctttatgkaattcaaaagaaagtattcctgttttctaagaaaatagctactaatgaatggtgaccaaaaaaaaaaagattattttatatatatmaagttatcctatgttaaaaaaaaaaagaccatttttcctaaatgcttagtttgtaaatcaattcacattacaagttccccattttctggttattatataatttacttgartatgtcctgaggaagtggggagaaggagttaaggtagttttaccagataatttgtcttgtgacctctttattttcttattgactgaaatttctaacctcaggtatcaatataatacttaatttgatgacgagcaatttattaacaattgattattgaatgaatgttggttaaaagatacccccaaaatagccaaaataattatttcaactgaatgtttacctctctgtgttcaggggcactgatgggcattgtccagggtaggaagatgtttaaaacatggtgctttccctctaggagctgaggatatataggatagtaggaaagataagcactgtacataaacaatggtaatgaggtaaagaaatactccatagatggtacaaacagtaggtgatatatatagctccttagaggagaaacagatcgtatctcacrggagcgatgtgggaaagcttactggaggaggggtagcatttgaggtgaattttgartaatgggacagatttagatccgtacaattggatagtgcatgttggaggaaacagcatgcagctgggagttgagacaagtcaggcatgtttggggagacagtaaagagacccttttagtggtaggtaagactatatagtggtagtttaaattagattgatagaggccatattttttagtacgttgggtactagacttttcctgttggcacttgaggtgttttgaatcacaagtgatayaatgataaatgatccttactatatgttgaatgaattaatttgttagacgttttcatttttgtacaaagtatgaagactctcaggaggcaaagtaattccccaccgtctagtttatccctagactccttaytcagctcatctgagtgttcggtttttctataatttctatcattctcaatttaaaaaaaaacaacatcraggataggtaacgcaggaagtgcattaacaattttgattcttattgactgctctcttttctttctctttccccaactcagaagaaggttacagggccaggaatggttctttttttttttttttttcaagtgtttaacatgttttgaaatatgtatacattgtggaatgggtatattgagctaattagctcacataccatttttttggygaaaacacttaaaatcgcagcaattttcaagaatacaatacgttgtaattaactgtagtcagcatgttctacaataaatctcttgaacttactgcatttctttaactgaaattttgtatcccttgaccagcatctccctgaccccaggaatgttcttcagcattagtacacagattagtcaagcccttctgtattctattaactttcctgaagaattatattgaaaattaagagattttttagctgtcccttaaaacttattagtcttagaaaattgaggaaatatttttagttttattggattaggaaaaatggaataatcaatagttggacgtttgtgttaattataattccttattttcttggaatatttaaaaagcactatggttgttatgaaaagcaaatttgagatcgttaaaatgtttgccctatgttttcagatatttacaccttcaatgaataagatttatatactttttttttttaaaagaggcaggatcttgctatgttgcccaggttggatcygatctcctgggctcaagcaatccttccccctcaaccttctgagttaactggggctacaggtccaagccactgtggccagctcatattttgactgaaatgttttcttaaaaaatttaatagtcaaaatatttgtaaaaacactctcttaaagttacttaaattatttgtaggttttatttcctagaaccatatggttatttttctattttacctgaagcagtagacattttagagagattacttaatctgtcataattttttttttttttttttttttttttgagacagggtctcactctgtcacccaggctggagggcagtggtatgatctcggctcacagcaaccttagcctcctgggtccaagcaattctcctgcctcatcctcccgagtagctggattacaggcctgcacctccatacccggctaattttttgtatttttagtagagatggggtttcgccatgttggccaggctggtcttaaactcctggcctcaagtgatcagcccacctcggcctcccaaagtgctaggattacaggcatgagccaccatgccctgcagaaagattttataaacctaatttattctactttataaatgaccatataatgttttaatccacttttctctctctctcaggagaatcattctacacatggctagaaggtaaacagtctgttctaaatttattggattttttgttaaaaaatactgatttatttagcatatttttgtaaggtctaggattttattacctagtcaactaattttgacagtttgaaaaaaaaaatgtgttttaggttaacatatggggataaaattatgtgaaaagtttgaagatagtggtcagctaaaaaccaggtttatataaatacacaggccaartactgtcatcaggttttcataactggttccctaatcttatttctgttctgtatgtaatgttcattcaaactacttctctagtaacgagtatgcaaaatattttaaaagtggagacattccttttggaaggaagtactttttatatataaaattaatggaagataaatatgaattcaaaagrttcgaaacatatttgccacgttaatatagtctaaccttgtctgattaaaagataaagcaatatagatcctgatatattagatgcttttgcattcttgtacttccagtgttgaaaatatcaaatgctattaatggaaaggtgaaatgttgtaggattttaataactcaggttaataactggatatatgatgcttttaaaaatttaccttaccaaattgccattagtatatgaaattaaaaattaaaatatattagtaacagataagcaagtagaatgacataggaaaattgatatttcatagccataaccttataggaatactacagagtaaaactaattctattttatgcatgtcaattggtcatgttatcttatgaatattayttcttttttttttttttgagtcagagtctcgctgttgcccaggctggagtgcagtggcgccatctcggctcactgcaacctctgcctcccagggtcaagtgatcctcctgcctcagcctcccaaatagctgggattacaggcacccgccaccacacccagctaatttttgtatttttagtagagatgaggtttcgccgtgttggccaggctggtttgaactccaggcctcaagtgatctgcccacctcagcctcccaaagtgctgggataacaggtgtgagccaccatacctggcctatttctttgtttgtaatgaactatgtgcatatgttggccattattaaggtgaacattattgatgtgcaaattctgttaggagttatatgagaaaatcacttatgtagaagatgtttagctttgtttaataagctctactctaaagatacaaattgtgaaaagtagcatttaggctagaaaaggtagtcagagactctgagtgttagtaatgagaatgaaatttagaaacaatattggattctatgtatattatatcaaccattcttccagtcttactgttttgagtatctgaatattgatacatggttccaaagagcattcccttataggcagctgactcaaccttttctgagattcagtttcctcatctggagcgtggagaggagcaatagcagtcctacttacactgtgagtgtagatgattcctgtaaaggttcctttggaaaccacaaatccacgtccaaatgccaaatattactgttacagtaaatgcaacccctttytgaaagttcaagtgctgaaaatgcattttaatgaaattaaatcgaaaagaggaagaagagaaccattttctaaattgtgtaattgaattgctctatgttgttagaagttggtggattctgccttggtaagtcagcttttgcagatrtcacttcagagtgagattgagaaggcttttgcctggacctcggtaattaaagataccatccagcctggcacagactgtgtgtaggccaggagaagctctccagcaatttcctgctaagtgtgttgtgtgtctgggtgcacttasttggtgcatattttattattaatttgcttaaagttacctgtttttcacagtttgtggaaatacatttctattcctctcccctcacttatcccctacctcattgcagtggtaggggctttgtgggctttgcaaattataactgcctcccagttttccaggtcctggtttgtaggcatatggattttcatgagttttgctttgcttactgtcccttctcttgtctttatccattttattggacataagcactgcttagagagagaggttgggaagaaaataaagtgaacttcaaatctgatattttgttacttgataatagatctgatgaaaagttttagtagaagagaagttagtacttaatgttgtattaaatatattcatattgtttgtatccattgttatcgtaaacattcaaaattgtcatatacttttagggaggaagctacaaaataaaattcartttcttttggtccccatccatgacaatttgaatattctagcaagaattcccaattagggaacgagaactcaaaagaattattttttctarttagaggccacgtgcttcagaatcatctgtgataggacagaaagagagagtgaattgctggaaaatcttaatagacacaaagaaaaccacatactcttacattaaaaaaaaatttcccccatcatataaatgagactattttgctttccactattaaagcccattttcctgcatggggaaagtgttaaaaacctgttggatgaaggagggaaaagctcatggccgtgtatccagtgacttcttaaaattttctgcatttttatttatttaagaatttaccatcttaatcatttttaagtttactgtttagtggcattaaatacattcacaatgtgtattactcctattatgagagaaaatcttttaaaatgggggcaggggttaggataggatgacgggatatcttgacctcttaagttctcagcaaaaaagcccctgtggcttaagaaggctacatcaaataacgttctgttatattcctgtactccactgatatgattccactgaagtagtaaacagtcaacttgttgttctttttttaattagttgaaattcctggatttctgttttccaagtttcagctccttacaagtagaacatatggttaaaaaattagacaatttcagggcagaaggttaataaaacccttatttctctgctagcaaataacacatataaggaagggggaaaaatccagcagtgactttataattacatttacttcagtaagttcttagnctaaaccacaagaaaacctgtgctgttgctgtctaacatgggaacttgccaactttatccatagtgttttgacccctagttgctcaaacttttctgcttttwtcagcattaagttctcatcatattcagttaactccattctgaagccaaaatcttactttgccttctagtgagagaatcttgatctaatcagttttatattattccttgatttattttaatgttcttcartcaaaaataagcctacatactgaacctccttgagtcaatatttctgatatctaaataggtgtaatttctttttcaatatttttctgaataggtttgtgtctggagaaaagagtcttctataagcttatatcrggacttcatgctagcatcaatttacatctatgcgcaaattatcttttggaaggtaatcatatttttaagtcgrgattttgccttctattagtgtaaaaattattggagagaatacatattctttagagcagaaaaaaaatcctgtttactaaaacaatgtaatgtatttctctttctctttagaaacctggggtaagcccagttggggacctaatattaaagaattcaaacaccgctttgaccctgtggaaaccaagggagaaggtccaagaaggctcaagaatctttactttttatacttgattgagcttcgagctttgtcaaaggtggctccatattttgagcgctcaattgtcgatctttacactggaaatgcagaagaagatgctgacacaaaaactcttctactgaatatctttcaagatacaaagtaagaattgactatccgtgatttgaaattctcctctctgtattcaaatgaggtagcacttaaagtacacaaaaactgactcctaaaagttaaccgaggggagatgtagaacagaaaaggaaagtgatcaatagaacaacagaatttaaaaatatttctgaaaatgttgatgaaaaagcattaataaggctttcttttgcagaaattttcacacttgagaatagtgctttaaaatatcactaaattttatgtagtatcaaaatttagtgctactttaatggtctttctaccaattttgtattcttctagtcactttatttacttacttatttttgagacagaggcttgctctgttgcccaggctggagtgcaatggcacaatcttggctcactgcagcctctgcctcccaggttcaagcaattcttgtgcctcagccttctaagtaactgagattacaggtgtgtgccatcacacccagctaatttttgtatttttagtagagatagggtttcaccatgttggacaggctggtctcaagctcctggcctcaagtgatgcaccctcctctgcctcccaaagtgctgggattagaggcatgggccatcgcgcctggcctctagtcactatatttaaatttagatgataatatacatgtgtttgcattgggatggatatgtaaggaaacattagccttatcttctagaatataaccttttaaacaaaacgcttggtcaagaaaacttgagttaactggtttttaaaatagcctggaagagaaagattaaaaagtgtttaaagtaaattatgtattaaatttttaaagaatattaagggaatattgcctattttttacatagattgttttcagttaattttttagattacctgtgtcatttatttaaaacattacagtcttactaaatttaacagccatctgtgtcttgctttagtcttttatgaaatagtttatgtgtgaactgtttgtcacttttctacattaccaaaacttacatcggagtaaataatgaattttaaatattcataaggatagaaaattttatcaggtttctgatacagagtacgtggatttttcatgtgtaacttaatccaatactatcattttatcaggtcctttcccatgcactttgatgagaaatccatgtttgcaggtgacaaaaaaggggccaagtcactaaaggtaaaaagttctcgattgggacayggggttgggagcagtttgctggttatgctttaatgctgtgcatccaaactgttttctttcccagttttccagcttcttgtcagagttggtctgattggattttaatacaaatggtacaaaaagcctttccatatttctcagttccattgaccaactgcttagtgaatcattggtcattagtatgtcctataacacctttataaatgtctttttaaaagatactagttgagggaaagttttcttagtttaaaakcagtgtatattgtcgttttgatgcagctttcagaataccatgagcttttagccactttgaggacaataaatatttttctaaagtttattttatggaatgttacggtttttgaaacatatattatgtttttgtccctttggactaacttaaaaggttaaaactacctgttaacatgtgacatcagaaggagaatatgttttgggaacattaccaaacttcatgttaggtgttctttattttcatttgcttaaagtacattaagaaacaaattgtacccttaaaatgttcataaaagtatttgaaattggcaatttttttttttttttacttttaaatttattttttgagatggggtctygctatgttgcccaggctggtctcaaactcctggccctgagctgtcttcccacctcagcctcccaagtacctaggattacaggcacaagccaccayacctggccacaaataatctttgagtacaacttcatagtcttttatatgtacttctgaaatccgggtagtttcaaaaactgaaacattttcttatgtttagtgcaaggtaattttttagcaaaacctgacctaaactggtgtaasaatatagcagatattcgtagttttgtggggttgttttcaaattctgcttggtatgrattttttatattttgctacagaaacattaacggatttgactgcagggtgtttcctcacactctggtgagatgtttcataatatacagtacatgtactgtatttctaaaatttaaaaacttctgaattctaaaacacatttgaccccaagatgttttagatgtggatgtactataggaaccaataaatcaatactgagtgattctcctttggcgagactttcttggtatttctgaaataagtaatttagtcacaactatattttagtgttggaaggttgttttattttacagttgttttagaggtatattgccattttggtattttgtatgttaattcatttttataatgcttcctgttttctaagtatcracacatatgttctacttttaatcttcagaatgatcttgtgtaatagggcaactataattatgtatgtttttgtagatgaggaaagtgagactaagcaaagcctaagkgtctcacagcaagcttttaactacacaatgctgggattttgtttgctgtttgtcaagaatgtatgaaggagaacctatgtcccttttccrtctgctgcaaagaacttacattacatgagaatatgaccagcacaggagtttttgtgttctatttatattgtctttctttgccaaggtattgattcctttcaaccctctggcagctggtcagggcttgtggtagccagagttttcaggctacttgcctcccgcttcatgcaataaaatatttccctcaatgcaataaaatgatttttattttctgcagttgccatgtgaaacaaatgaggaaattttctcttaaccaatcttatccgcagataaagtgagaccaaccttaaaggcatattgcacacaaatgcttataggcagaagmatttccccagtgtaggaaacttctctttttttttttttttttttttgagacagagtttcactctagttgcccaggctggwgtgcagtggtgcgatctyggctcactgcaacctccacctcccgggttcaagctattcttcttcctcagcctcccaagtagctgggattacaggcatgcaccaccacacctggcagattttgtatttttagtagacatgaggtttcactatgttgtttaggctggtctcaaacttatgacctcaagtgatcacacctyggtctcccaaagtgctgggattacaggcgtgagccaccctgcctgaccagtgtrggaaactattayagcaaaatagagggatccagtaagcatctccataacaactgcattagcaaatgtagaggactgtgggaccatrtrtgtcacacaggcctgttatcattcatattgattgagcaaccatgacaaacatagtgtggtactaaggagtgatacaaaaattgatcattgttctaggactagctttctgatataggcttacacaaagcaaaggatcaaaaataagtgaaacataaactagacatatttattrttggttgtatgtagataacaaatggaagcagcaattaagttccttaaaagtaaagaccatgtattatttacttttgtatctcccatagtgcatattttggtgctttgcataaagtagctcctcagtggaaagtttattgaattaatatgcagaatgaattttattaatttccattaatgtcagtattttatgtaccatgttatagtatacaagtatcargtatttttctttactgttgaaaaacacaactcgggttgggtatggtggcttacaccgtaatcccagcactttgggaggtcgaggtgggcrgatcatttgaggccaggagttcaagaccagcctggmcaacatggcraaaccccgtctctactaaaaatacaaaaattagctggkcatggcggcatgcgcctataatctaagctacttgggaggctgaggagacaggagaatcccttgaacctgggaggtggaggttgcactaagccgagatggcaccactgcactccagcctgggcgacaaagcaaaactccttctcaaacaaacaaaaaacacaactgatttattaataagcatcaaaacttacytatcgtttagccaaatgcrgttcaattttaaaagtctaattagactgaaaatattttctgcttgctaggaggaattccgattacatttcaagaatatctcccgtataatggactgtgttggatgtgacaaatgcagattatggggaaaattacaggtatatgtgttgtcttctcttttgaagccattactaacctttattttttccactgagtscaagctttttattaaaatgtcctcattgttcattgaattagaatttagraataggcagatccaaggtgttttttctgttgatgaaaaaattaatattaaagtatatgtgttacatgtatgtgaaaggatgtttctcatattattctttagtgattttagttttattgtgtctatgtttctattgatacaataccagattcatttgtgaagttggtggtcattacgaaccragtatatccgtattttacatatgtatatagaaaggtaaaatgtaattacataaaaagattgaaatatgaagtcttggtcattgaatttgtwtaaatgagcaaaagaaggtcacttagtcaaaayaggaaagctccgcaagacaggtccattactctgtgtaagccagtgtcaaaaggattgttgaatattttatctctttctaacaaagatggtaayttatagaaaattaagagacaaaattattacagtggaggctatactgaaataaaawgtctttttctatagtgctaataattgagaaattattaagtstgggtatcaataatctctgagttttgaattgctaaaagctgtaaaaagtcctttatggttacaaattgaacattgtaatcctaatatggtattttcaaggttaaaaaagtcattttaataatttggaatagtatgatatgtattcaataagtgttaagactattcaggtttccttaactgctcagatgtgtttattatatgcataacctgtgagaaagtagaaacygtagtaatatttttgtgaaaagctcagttcatatgaatttcctaactggcataacagtggctatatattcctttaagcctttttactagttattattatttaaagttaattatgagtttattgstattttctttagactcagggtttaggaactgccctgaagatattattctctgaaaaagaaatccaaaagcttccagagaatagtccatctaaaggcttccaactcacccgacaggaaatagttgctcttttaaatgcttttggaaggtaagaaccattatatgttgaagatttttgatttcccattgggtttcaacaaactgcaaagataatcttctttgctaaaagtrgggtttgttttgttgacaaaaaaaaattttatattgtatctgtactaacttagagaggccttaatgctgacaagtcagtttctctacaggtcataggaaaaactaagtttccaattgccagtgtttttcagtttgctgycttaattttgtaagggagatwttcttctaatattctttttgcttggctataacttgttcaactacaatagcaggagtaaggaatgtgtgattgagaaggtgataaaagaaaattaaaaccttcatctgctccttatttttcttaaattttcattactatttttttcttttctcacctttttcctgcactatgctctttatttctgaagctcagaggtcatttttctttcactcatttctacatgatttacttctgtatasagacatataatttgcttgcttgtttayatcaccagtggtttaaaaaataatttgaatttgccagcagagatacatgtaatgccaactgaggaatacagaacagaaggaaaagaatcacagaaaataatactatgcttccttggggaaaaagagaaaaaagtcaacttgaggaagaattaaaaaaaaaaaaataggggactaagtaatacaaagattatttcttgkttttcttaacatgtgttttaagttaaaaagaagcagttaaattaaaaacagatttattatatgtcccctgctttttttttttttttttttwaaagagatgagggtctcgctctgtcatccaggctggaatgcagtggcacaatcatggctcactgcagcatccaaatcctggggtcaggcgttccttccacttgagcttcccaagtagctgggactacrgacacatgctattttgcctggctaattaaaaaattttttttgtagagatgggggtctcactttgttgtycagtctggtctcaaacacctggcttcaagtgattctcctgtcttggcctcccaaagtgctgggattacaggcatgagccactgtacctggccatttcccatcttaataacaaggatttcagctgttgcttccctgtatttaaagatgactatgtaggttgagatttcagacacaggatagatatagactatccattaactggtatttcataaaaaattcagtccatccacttatgaggcctgtagaaagataacacaggagatactgaatgaaatttaaataaattgaaatgaaaaatattgtaaataacttaagcatctcttaagtccaaattaaattgagaaagatgaaaacaattgagaatttcaaaacaattgaaaatttccttcgatctcataaaaaatattcacaaatgcagcctttcttgttttagttctatatctagagcttattaccttttattgttccctagagtaatggactcagaatcaggggtcctaaagttctggaatcctggcctgccctttagtagtggtatgaactcaggcaaatcactgctttcctagtttgtttcctgataatgagatcatatatgtgatgggcttagaacattgcctgtcctcctaagtgattaaggaataatttttcttctatcaaatagttaaagatttttcttctatcaccccygaattgtacatagggatacttgagcttttagaattacttttttatatttcccatcccagagttttactttttggcctgggctgagaagcacttcatttagtcagtcagtaatcatttactgaatrctataagcatcaatgggtatggggcacaggagagagactcagcaggagatgaaatagagtctttacccttaggragctaacaacataagacaaattagtgtgtttggggaacattgagtaaagagcaatcatttgaagaggaatgtgcaaaataaatttattagaccaattgtaaatgatttgagattctttattaagaattattcatatcactgttcccattattaatctaatgtctgtagatagtatgaagtaacaggcttcctttgccccttctaaaccagtcttaatgagaacactaatttaaacatggaagcttcagtgtttgakgytttttattttaggttttgctttcaaattatagcttatgtaacaatatcaataatttgaaacagtatgcawcatgttagccttactaatawgctttttctttcttccataggctttctacaagtataagagacttacagaattttaaagtcttaytacaacasrgtaggtaataaaggcttttatgtgtctaactagagacataaagtgactgtggaaagccttttaattatggacattcatcagaaagacactaatctgacttcaagaattctgaactattaaatagaaaatttaaatgctcacttgaatatttatgattcttaatagattattatcaactagagatatttataaatgaagtatatacttttaaaacatgtaagttatactaattttgtgtttaatttcatatgttttcatgtaatgaaaattctattttttttagaattggttttgtttttattctattatcctttatttccagttgtcaaactttaaatggctatgtctgcattctaataacactgttcagtctgttatggaaaaggagaactagggaacaaatgttgctcagggctggtgtcagtgagaaaaatttatcaatgctttttaatgtgtttttacccttgcctcactstgtgtgtgtcactttctataatataaagaaatactataatatttctagaatctggaactgtcaccatgatgaatggccctttcaatgcatagttacagaaattcctgaagattccccaggacttcaatttcattggtttttatttgcagtttttagttgctgtaattgttgctgtttccagtctaaaggacctcctttggtaaaggtgaacaagacctctcccctatgctacccagccagattttgtgtgtgtaatgggctggcccaagagtgttcttttacttagaactccttttgattttgcttttctctgcccctagaaattttagggacaaagacattttggaaattgtcagttacttttagaaagaaaacactgcagaaatatttaacagattacttcttgataaaatttaaatgggattatatgaatttrtaatgccaattgaaaatattatatacacaaaatttgctattttcacttaaagtaagcatttttaaaggatttattttagaatacaatctatgcaatcctcgaactcagtgtgcttttccctgacaggatatataaaaaggtagattaggtcaaccctcctttaagcttmctctcccctcaccttttcttttcactgtatataaacggtactttctgtgattcataccaacagtcctaaactgtcattttctaaatctgggatttaaaatctttaracaatatttaaaatcttgattttttttaaatgtcagcagatacaatttggaagattgcatctgtgtagaagtaatgcaggtacaagatctagagtttttccttagactctttagtcttttctgaattaaagaataagtgctcttaaatccatattttatcctgtcaaagtctgaaatgtgttcattgatgatttggtgacatctaaaaaattgtatttagttggcttggctcacccctcttaaaaatacttagccatctcttggtgggatgtggtgggggtattaaggtctcagagttatttattttctcacctaatttcaaacctttataaacttggggttttgttgttgatggtggtagtattttttgttaagttgtttaaaaggctgacttgattggagcctcctctactttttcttgagggttgcaagtattgtatggtgggggaggggggccttaaggcaaactgtctaaaaagtgactatccaattaatttaactagtaaattagtaagaattattcttagtattcaytcagagtttaagatgtgaaaaatctgcactttgtttatcactctaaatgtaaagaactttttgatagtgttatttcaccactccctcagttaaaggctattatttaaactgtttactggagaaaatcctcgctcatgtccatttattgtttttttctgtactgtgatttgtttcaagcttaggaaaactagtatattagagtatgttctaggaaattaaaagatctggttagagtaaaaagttctttttaaggttcttaactaattttttcacaactaagaaaataaatgaagtattcttaggctgaaattcatcttattttatcataaattagattgtaggggcagcctacatttttgtgtatgtgtttttatttcttaaatgattgtgtgagcctggtgacattttatggttcttgtgatctaaactgtttttccaattcacatcttttgtygtgaagtgatattatactagagtactgtttgcattgtaaaaatgctttgctggtgctctggcattttgtctttatctcatcacctaatttaaaaacccagcacttgataatataactgacagaaatgattgtacccactgatgaagtaatgaaaatgaagaaaaggaaaatattccttccttcaatggcgtaagtttattttttacttaagtggcatctatgtaagttagacaaactatatattaaaattggtaaactttgaatgtttctcctgttttgattcttagattatgaggaggatcagacagaataagactccacacttttgaaatttgataagtcaaaacgttttattttgacatttttaacattgtgaattattcgatatttgtaatcbatgtatatgaaactctgccatgtttttcaactttgcctatgtgccactgtatataagaaaggacagctatttkgatcttcatcagcattgccttcagctgaaaatttgggaacagttcacagtaaacctctcagtagtttgcaaactgaggtacctgcagaaaccatagctactcaccaaaatacacagattaggtgcatggtatcgtggaaattatttggtaaaaaaacacacacacaaatctatgtgtactgtattttaaggaatatctacaggtgcagctttgattttgaacagaattccaartaatttactgttgtacccaccagaatctagaaaatgtgaattaaagtacatgtttctgcaatcttttctgtcttgtttttccccgctattttaagtgtttctttttatggcatgagaatttgattgtaacctgtggagaagggagaaaatgtatttataagtagtctgaggttgtttcttatcataatggcaagcattggctggcaytgtattaagggcttttacatgcatagtttggctttaaaagaatacaccgttaatcttcacaatagcactagtaggtaggtacaattacttctctgttttataagtaagaagactgaggataaaaaaggctaagtaacctgtccatagtcacaaattctaggttgtggagcaagaatttgagacgagaaagactgattctagaacctttgtgacattttgtaagttggcctatttccattcagctacaaagtgggaacaattaaaagcattgtttgatttgtattgaatcataaagcttataaaatatgcttatcttatttaattttttgaataggtaatacattcacatggttaaaagaaacaaacaatataaaaagttattcagtgaatgtgttcctgtgtccttggcccagcttcctccactgcacactcatctcccaccatgaatagcctgtgctcttggtttcttaggtttccattcacactgttgtagacaggtacaaacatatacaaatggaaagtcttattttttctctcatttttactcaaaaattgacatcatatacatacgacttcatttttttcacctagtatttcttggcagtcttcacatatgactagatagttttctcattttttgaagtagatacttggtattctgttatgtgaatgtgccagtgttgaattaacccgtcctctattaatgggcagctgggttgtttccagaccttgtacatatgtcatttcacatttatataaatattgtacctgtagaataaattcccaaagataagaattttgggggcaaagactgtgtgcatttataattttgaaagatattggcatattgtccttcataggggtagtcatcaattcacataccatctaaaatttatgatagtacttgctaacctgcaacattaccaatgtagatgttattaaaatgttggattctggccattctggtagatgaaagtttatatcaatgtgtacattcttttattttccttaaaaaagagacggggtcccacgttatcacccaggctggagtgcagtggtatgatcatagttcaccgtagcctcaaactcgtgggctcaagtgatcctccagccttaacctcccgaatagcctggcttataggtgcacgccacacacctgactgctcagtatgtaaatttttactatgcctaaggttgaccaccttttaatatgtttaggagccatttgtatttccttttgtttcccatattgttttgttcctatccatttttctactatatcgttgatatgttgtttatttgttagggatatgaaccctttgacagtaatgagttgcaaatattttctttccaatttgtcatctgtcttttgcttatgatggctttgtcatgagttttaaaaaatttttatgtagtctgaattaccagtttttttagtggtttctggattttgagtcataattagaatgtttttctcaatccagagcaatagagtaattcacctaaattctacatctaaattttgaacctctgaagcatattctggcataagatataagttatggatctaacctaattttttccgcaggtgattaacccagttgttccaatattatttattgaactgtttgttttttcctgacgagtttgagaggctacattgatcttatcttagaatccgtcatatgtatttagctgtgtatctgcttctgtttctctgtatctatttcattgctctatttagtcatgcactagtaccacattgttttaattacccaggctttagttttaatctagtgcattggtcctccctcattcctcccctgcccacctttttttttttaacagtttttctaactgttcttatttttccatatgagctttaaaaaattcttaacatatagagcatactaaaactgtccaactcaagttctctcccaagggttgcacttttaaccacttattttgtcactgttcttttgatactttacctgataaagatacactttttactacttttaaattattacagtgttctatttggcagtgcccaaacaggtgatggcagatagaggcaggatgcaatgcctgtgtggaaagaatgtcatctcagtgcttctattttaagatagtctctaggaatgatttaaggactgttctcatgtaaaatccctatttctttttttattccattacgaattatttgcccaaaagttggatatctgtcaaagattcataagacaagagggagagacccttaaataagtactaaacttgtaaaatcartatgtggataaaagtgcaagtacaagaagttactttggaaaaaaaaaaaaaagcagacatctaccaaaaaacaggatttgactattcattcactgttataggagctgggactatagcagtgaacaaaacagacaaacattcctgccatcatataacttaagacattataacctacctagattgtagtgagaatgcaccaaaagaaaaaatacatcaaccaaagggaaatggccaactagacacccatctagtgcagaaggtgtcctcaacatgaatgaatcttagtgttgtcttgacaatgccatcagattgtcatagattgatgctattaatcaattaaagtcattcccctaacactggtcagagcggagttaacattccaagcaacattctggtatcatttaacttctgctatggctttccttcatagaatatacctccaaatgggtgtgtgttctgttccctttaatgagcttaaacctgcaaacctggagcccagactcttggctagtgaattcaccaaggagatagcactcaaaggatactaagttacacatatttaatggccctggtaaagcactatttgtttaggataaatgcatgctaatccattaatgcagttaatccgttcaaggagcactgtaacttgggcctgccaagagactggagggactgttgtaggttagcgcgattcatggggaaaaggtcatagtaacaggaatcaatagaaaaagggggcaattttgggaatcttataggcatctgatctccacttaagttcaggggcagaaaatctgttctggacatagtctaatattttgagtggtaggacatccaaggtccaaaagggcagaccaggtttggagctagagaattagtattagcaagatgttaatcagtttgagaaaacagaagacagggtccagccatagctcaaggactagaggtagagaatccagacttggaggaaccaggtagatgtcattaggagttgctgagtcactggatttagatcttacaaccctgaacccataattaatgacctgggcagccaatctcagaactccacacggaaggcatgtagtatcagtgccctggcccataggaaccgggcaacaggtacagggactctgacacagatctaggttatgggcacagggacatcctcagaagacttcaatgtattttgacccttggtgcaagagttcttatgtatccttgctaagggcctagagtaacgttaataagtgggtgttcctgagtatagactaggatccacagaaacgtgacgagtgcctagtccagcgtctctcatataataggtactgaatagacattgaatcccactctcttatcctcactgttccttgttaaatgtttcctcactttaatccgtttattaattgaatctttttgatgagacaaattccacaattttagcctgatccttttcagcagctcctccatctggacccatgtcttaagtagcatgatagtatacagttagaaatgtcctttaatacaattctcatataagatgaaaactgggaatgcatattagatgtgtctctgatcagatctatgctagtctcttcctcatgcaacaatctaaagtgaaagaatggtattttttagataaaggttgtctagttggaaatctcgataaaagtttcaaatatttagacccatttagttctaatataagtttacctttactgttaaaagataaaagcaagtaatatccactatgtaaatatgagaacctttttctcacagtgcttctcaagttctagggtttactaatatgtattcctttcttcttaataaggtttaagtgttcaactaggtgttggcccagcactaaggtcaacaaagagcagctgacttggattttggtgaaagaggaaatttgaggaggcattagtgagtgtgccttatctaagtagctaaatttaaccagcaaagcttttaatttgcctgatacattcaagagagaattggtataaatatgattgatgtgtatattgtaatagtcaaaccttcttacagtcacaactctgtaacataccctagatgttttaatcagcagctcaactgagttcattgtaaaaagggtaaagaaccaatgaaaaatatctatacaatattcttagacaattagctgcagaggtagacacctattccaatagtcagagaaactatttccaacagttacccagaaacgttcacatgaaacttttcagtgttccatcagacttagctaaatgatggcacaaaattttcagtgattccctcttccccatatacttcaactttctaatcatcagggctttaatttcatcgtgttgctttaaaacaagaggacatttgggtattttgcaaccagtaatcaccattccttttcctcttagcatttaatattccacataagtagtttttttgttttgttttgttttgttttgagaccgagtcttgctctgttgcccaggctggagtgcagtggcgcaatgtccgctcactgcaagctccgcctcctgggttcacaccattcttctgcctcagccttccaagtagctgggactacaggcacccgccaccacgcccagctaattttttgtatttttagtatagacgggctttcaccgtgttagccaggatggtctagatctcctgaccttgtgatcctcccgcctcggcctcccaaagtgctgggatacaggcgtgagccaccgcgcccagccagaagtagttttgttagtgtacctagtagaacaagtaaattagaaagccaaagggaattttaattttccttactaagaaggaaggagagtttgagtaatcaatcatagtttttttgtattccgtgtttacaacacttctagaaattttagcattacatttttaaaaggggaatgagaaaaataggcacttagaacatttttatactatctaacaaaaataatagttcaaataaatcccagtagcttcatcataaaagtaggctgacttctctcacttaatgctgggtattccaatttttctgccagtaacaacagaactgtgtttacatattacaggatgagtatgatattagtgatagtcttatcactatttttaaaaatatatcttcccttagctgacctaatactgaaggacttcaggactttctgaagatgtaacttaaaggagtttaaaacatgctgagtctgcctttaaattaactattagtaatacagtgtgaccacaataatctgttaaagctatttagaataatagcttataatgtgttaaggcaacttgaataacagtgtagggttcacttcagtatagacttttccctgataactactttaaatgctatgttaccccaattttttcatgtactagaagacaagaatgttgttatgtaggattatgcagagtgaaggtgttctatacacatgaaaagcccaatgatgatcaatttgaaacttgagatcccaattttaaatactaccaaaacaatagtagacttcatctgtgaaatcaatgcccagagatcagttattcctgaagatcaaaatgagaggagtcatttgaaatgggttgcatcatgtagtaggacttgttaatataagttccttttcattgaaccttccctctgtccccagatgagcattcctaggcagagaagaaacgtgccttgtttctggtaacagtacttcctctagaaccttatctctgttttatagaaaagcagagcatttagcctccc

SEQ ID NO: 94043 - DNA, 118041 bp, Homo sapiens
  misc_feature (1)...(118041): n = A,T,C or G
tttttggaaaaaaaagtcttttaaaagtccttgcaattaatcctataagtgctccccccacctttatttcttggatactgatattttcagtatttggaaataaagtttgcttactcaaccctaacttacggtgttgggtgctggcacagggctcctgaatccccactccaagactccttagttttatgaggccttggctcgctcttctttcttcttgtgtcttgtttcttttttcttttcttcttcttcttctttttttctttttttttttttgggacggagtcttgctctgttgcccaggctggagtgcagtggcaccatcttggctcactgcaacctctgcctcctggattcaagtgattctcctgcctaaacctcccaagtagctgggattacaggtacctgccaccatgcccagctaatttttgtatttttagtagagacacagtttcaccatcttggccaggctggtcttgaactcctgaccttgtgatccatctgccttggcctcccaaagtgctgtgattacaggtgtgagccaccgtgcccagccttcttctagtaacttctttaagccgcaatttctgctcctctaaaataggggcaattatattgtgaacccaaaatatctgagacgagtctcagtcaatttagaacgtttattttgcctacattaaggacacgcccatggcacagcctcaggagctcttgtcgacatgtgcccaaggtggtggggcacagctttgttttatacattttagggagacatgagacatcaatcaatatatgtcagatgtacattggttcagtctggaaaggcaggacaacacaaagtgggaaggggacttccaggtcataggtaggtaagagacaactgttgcattcttttgagtttctgactagcctttcaccaaatatgcaatttacaggaatagtcacttacgcctagtctggcttagtgaaactatagggcagagcaagcaatcagatgtgcatttgtctcacacgagcagagggatgactttgagttctgtctgtcctttgagattttcttgtgggcacattgtgagggagggaggtatatagctttctaaaaaatctttgtagctatcttatttaggaatagaatggaaggcaggctcgttcaatggagttcccagctttaaccttccctttggctcagtaattttggggtcccaagttttttttttttttttttttttgagatggagtcttactctgttgcccaggctggaagagtgcagtggcatgatctcagctcactgcaacctctgttcccaggttccagggattcttctgcctcagcctccttagtagctggggctacaggtgcacaccaccatgcctggctaatttttgtaattttagtagagatggggtttcactatgttggccaggctggtctcgaacttctgaccttaagtgatccacccatctcggcctcctgaagtgctgggattacaggtgtataatctgcacttgactccaagatttattttcctttcacaatatgaaccctatgttatagggtgaagattaaatatgagattgtacataagaacttagaaattcatctgacagtatgtgtaagctaaaacccatttttgcatttaattttagtcctgtctacatttaggtgctagcatagttagctaggtaaaagatgaactgtctttggataattaagaatgcttctgtccaggtgaagtttaaaaaaaaaaaaaaccttctagagtccctggaacaggtggcacaaattcagccaattgataccctccagtgtcaagtcttacagagagagacagcaaatctctacctcagtgcaggaagaaagggagagcgagaccttccagggctattggttataataaaatgacattcctttttaccttgtacctggtgccagggccatatcccacagattcaaaattcagctcatttagtacaatccatatgggtaatcataacggttgttgacctatgtgataaggcccctcaaccatctgaatggacttcccgctcagccagggtactcttaaaatgtaacctgaggccgggtgtggtggctcacgcctgtaatcccagcactttgggaggccgaggcaggcagatcacctgaggtcaggagttcgagaccaacctggccaacatggtgaaaccccatctctactaaaaatacaaaaattagctgggcatggtggcacatgcctgtttaatcccagctactagggaggctgaggcaggagaatcacttgaaccagggagtcggaggttgcagtgagcggagatcacgccactgcactccagcctggcgacagagcaagactccatctaaaaaaaaaaaagtaacctaaaagactggttcagaccatgaacaaaagtgagggtctgggccatgcctcattatacctctccggcattaacatcaacacagaccttaagtctgataagaggcatttacaatctattctctccgtagcctgctacctgaaggcttcctctgcacaataagaactttggtcttcacaatcctttaacccagacatttgctttctattgatcccaggtctttagataaactcaaccaattgtcaaccagaaaatttttaaatctgcatataacctggagggccccccacccccaccctgtgcctggcttcaagttgttccgtgtttctgaactgaaccaatgtatttcttaaattgtgaaccgaaccaatgtacttcttaaatgtatttgattgaagtctcatgtctccctaaaatgtacaaaactaagctgcacctcaaccaccttgggcacctgttctcaggacctcctgagggctgtgtcatgggccatggtcactcatatttggctcttaatgaatctcttcaaatattttacagagtttgactctttttgtcaacaacactatgaagggatttgagggaaggaaatagcggggctcacctttgtgacagggatcttctgggggaaaacccatggtcaccccagtagactccagaagtagtacatccttgttccagatctggcccatagtttatatttgcaagactcttgactagcaggacacaaagagccacctaatgggtttgacacaaccaccaagaccagagaataatgcataaagctggaatgtcaatttgctactgctatacagtaggagttggatatttaggttcactgatctccacttctatctatgaagacaaatccacagggaaagaagtcccaaatcaccaagaggttgtttggaccctaacctctaaacaatgggtttgtgttggatgagtttaatgagaatgagcttaatgagggggaaaaaagcaggctagcaggctatcaccaacttaaaatagcaggttctctcctacagagatagagaccctcgttagtcccagcccatccacagatatagttgtattagtttccaaggattgctttagagtttccgaggaagtacaaaaactgagtggcttaaaacaacagaaatttattacctgacagttctggaagcaagaggtcccaaattgaggtgtaggcagagtaatgctttttctgaaacctacaagggagaaccctttcttgtctcttctagatttggatgtctgctggcaatccttggagttccctggtttgcaggtgcttccctccagtctccacctttgttggcaagtggctcttttctcctcgtgtatctccccttctcataaggacaccagctacgctggatgatgatctcataactaaactaacctgcaacaaacctatttccaaatagggtcattaaggtcatattctttttttttttttttttttttttgagtctgagtatctctctgttgcccaggctggagtgtagtggctcaatctccactcactgcaaccttcaccctgccaggttcaagcgattctcccacctctgcctccagtagctgggattacaggcatgtgccaccacactcggctaatttttgtgtttttctttttcttttctttttttctttctttttttttgagacggagtttcactcttgttgcccaggctggagtgcaatggcacaatctcggttcactgcaacctccccctcccgggttcaagtgattctcctgcctcggcctctcgaatagctgggattacaggcatgcaccaccacacccggctaattttgtatttttagtagagacggcgtttctccatgttgggcaggctggtctcgaacacccgacctcaggtgatccgcccacctcagcctcccaaagtgctgggattacagatgtgagccaccacgcctggttaatttttgtatttttagcagagatggggtttcaccatattgcccaggctggtctcgaactcctggcctcaagcgatccaccagtctcggcctcccaaagtgctgggattgcgggtgtgagccactgcacccggcccaaatagggtcatattctgaagcactggaagttagggcttcaacatatctttgagggggacacattgcaacccatacagtattcttggaactgtaaatcgcgtttttgtactagaaattcactgcccctttaggcactatgtattcctctaatcttatttgttactcttttacgactttaagaaatacagaatttggtcagttttagctgagagagtaaactttgatgacttgcatcaaacagggactggcacacaactcctggaatttccagtaagagaatgtgaatgggggacagttgccgactaggtgcctgaaagatcatttttcaagaaacacgtcaacaaactttgagggatacatgataattaaaaaactagcttcaacccgggaggcggaggttgcagtgagctgagccaagatcgtgccagtgcgctccagactgtgcgacagagtgagactccgtctcaaacaaacaaacaactagcccttataatcttttttttttttttttagacaggtgcatctttacacagttaaatttcactacttctttttttgcagataaaaactcaggagttgagaaatgaataaacataataataaatatgagaaaaccatcatgatttatcaagcctggataaataatttaataagttcagcatagaagaccttgcttttttttctttcctccttttcttcttctttttttttaacttatttatttcaataggtttttggggagcaggtggtgtttggttacatgaataagttctttagtggtgatttgagagtttggtgcacccatcacctaggcagtggacactgcacccaatgtgtagtcgtttatccctcacctactctcaccctagcccttataatcttaagatttttggctatttagggccatctcattcctccctcccttctttgttgcattctctctcacctactccattccccccaccttccaagtaagaccatctttggtaagatggtcttggtaagaatgtgatacgcattataataatttttcaaatcttcaaaattgaggtataattacatacaataaaatgagaatggcatgcaaatttgtgccttttttaaagcttagtaaatgtcataatttggttatagtttttatttttctggatgcatttgcttttccttacatctaccatgctcagccttacagagatttttctagatgaatttgctttttctcacatctaccatgctcggccttacagagctgccctttattttagaattccctaaagtgctgtgttgtacacagggagcttctcctgactggaacaaccttacctggtaccactcttccttcaggacccagattcttctttgaaacctttccctggcccctttgaatactctagctcttttaaaatgtatgtggttcttttttccctgttcaattattaatctaactaggttgtgagttcctcctccaaggacgtgagggtgcgatgtagcttgtctgattttgcattccaagtgtgtgccccaatgcctgacacatagtaggtgctcaatatatgtttactgtcaataagttacaattaacacccccatatggtaattcagagttttcatagcgcggtcaaacgatctcatttaacgcctactacaaccctaaaaaattctaattactaccatcctatcattcttgtttgtagagtgtggagactgagaggttaactgtcttgcccagcgcaagtcaacagcaaaacggaactaaaatttcaggctcgacaccacacagcgtgtcgagatcagcacgaacttggcgctgtgacttttccttagaggggccacttaggcttacacttccggatcctgggcacacagagacgcgaaaagctcccgcgggaaactggggagcgggactacatctcccagagagccccggggctaaacagcaggtgattggttgatattgacagccaatgcggctgcgaggagctcgggcagaccaatcacaggccggaaggggcgggacctcccacgccgaggatagattgagcgcagaactaaccgcgctctgaaaggttctaaatgtctgcggggctcagagccggatgtcacgtcgtcctcctctgccggttttctcttgggtccttttccgtgccgtcccgcgactccgcctctggccgcgcgtgtctggctgctaggccgacaccaaggactggccgggtacccgggaagaaagcacgtgctccagcagttgccgcgcccagscccgagagaggccctagggcgctgcggrctttcggggtccgcagtccccccgcgacgcgagccaacgggaggcgtcaaaagacccgggcyttgtgtggcaggctcgcctggcgctggctggcgtggcccttggycgtcgtcacctgtggagagcacgtcttctctgccgcgccctctgcgcaaggaggagactcgacaacatgtcacccgcgctccaagacctgtcgcaacccggtaacgctgcgaccccgtctgcgtggttgggttgtgtttcttaaytcgtgctgtggcctcctaatccctggggcgattcccttctgcggcgggagacgcccggcggtgtttccccgcgtgtgggcggcacctttagaacttagcgcaggagcccggagggctacgtgttttgctccactctttgtccgaccttcacctctttctccccaggcaagccatcaaaacctgcaaaaagcgtcctcccctcgcccccgaaacacattcttaacgtcacagtaactaaactttccagttccacgcagcataaaccagctgggccctctggaagtttttttttttgcatggtgtgacgcttattcgtaaatatgtattgcgcacctactgcgaaagaaagttcaggcgcggagagacagacgaggaaactcagagaactatttaaaactactacatggaactttttattttctgcttctacgcacgctgctgcaaaactgcaatatgcatagactcactatgttaaaatagatgagcagaccccacctccagataccgaaatgggaggtagtaatttcaagcgattctgatgttggtggccctgggatcaacagtgagaaaaagctagtttagcacgagaactgaacgtaatgttagctttataacgagctctagatctctaaggtcatgcctgattataatttgaggacaaatacacccgtaaaaacgggtgaggagatgtagaaacgagaattagtgataagtacaaaacagtaaatatcctatcacatagtggggatgtttagcttcaggmagagggggaatactaaattcgtaacgcacaaggaaatttatcagaggttaaccggtgactctcttgattcttgggttctgataacgggactgatataattgttcttgaaactagtggaactgtggctgagaaacacatcactgctgttattaaataasatataaacctccctatgagaggtttatatgttatttaatatattaaataagatgtaatgaggttacatcttatttatatttaatatttaattaataaatgtaaacctccctataagagatttatatcttattgaataaatgatcatagggagatcatatttatttggaaaacatcttttactcatgatttctggcctcccccttcccatttaatttaaacaagtaaagttatttccctttcatctgaatttaggtgtcattatcaggagcaaaatgccactgaagacttaaaatactgtgaatagtgagtgatttaaaaaaaaaaaataaactgaaaggaaaattgttgaatgtttgaatcttgcctagtcccctcacccccaaggctggcttctagagttgagcactgagtggagtttaaccaagtctagggcctctgaagttctgaatcaggccattgtgcctagaaaagaccttagatgtagtccagcttctgtctatgtgagcaacttttattgggattagaatcaggttttaacttcctaataacccttagtaatttactggcgtacaatcttaatgaaattttaatggagagctgggaattcctgattctcaaggttgggccttaaaactaaatgtgacttcagaccatggttgtgtgccctggggaaggaggatggtgggctagcaaatacatcttgggagaaaattttaactacagcttctaaaagtttcttggtttcatccttgcttaggactgtgagtgttatttggaactcaattgatgagtgattaatgaaggaatgaataatccagtgaattggtatcaattgatgagtgattaatgaaggaatgaataatccagtgaattggtatcagcctaattcttctccggcttattaaaatcaaagggggaaataatatatattaaaaatggaatactgcacaagcaaagagatgcccccaaagaagctgggcgcggtggctcatatctgtaatcccagcactttgggaggccgaggcgtgcgggtcacctgaggtcaggagttcgagaccagcctggccaacatggtgaaaccccatctgtactaaaaatacaaaaattagctgggtttatagtgagcgcctataaccccagctactcaggaggctgaggcaggagaatcgcttgaaccctggaggctgaggttgcagtgagccgagatcatgccactgcactccatcctgggtgagagagtgagacttagtctccaaaaaaaaacaaaacaaaacaaaacaaaaccaaaaaaacaaagtgtagcaagtctgtgcaaactagaaattagagatccaaaaatgaaagagagaagtatcttgcaagtgacttgtagggcagtagtaagattgtttttaataaagcaaagaaagaacagtgctgagaaagccttgggatcatttgattataatgcagaaaataaaaatgtgcttttgctgtatgtgttccccatttagcacagtggaaagaggggtcctaagtaagtcagatctatttggggtcattttaccttcagagcagatgtgttcttgacactgcaatttataacttacatgcacatattaggaatttatttgtttaggccttcatcttgtcattctttaggctagttcttaaaggtggtactagctggtctacccccctccaaatctgactagggctttaaccacttatacctatgtttattctttggaacacttgctgtgaatcagaatattgttagctagaaaataagatgttaagggcacggaaaaaaaccccacaaaatatattggctaaatccactcaaaactggagaaaatactgtgtgatctcttaggctcactagccaaggatgttccttgggactctcctctgcactgcggttatttacatatatacattaaacataaaaatatttctgaaatagtgttataactagtcagctaagtaaaggaactgcaaaactatattcttatatttactgtgaaagataatcagaaagaatctgctttatttagaacttgactagtcagtagttaagtatacagaatgttctagacctaatgaactgaatacagataaatacaattttgttgttcttcatggaagagtgacatttcagtagatccccactctgccaggggaaggaattgtcaaggtgacttattcttttgagcaagttctgatagtaattggaaactggtgaattagaatggtaattaaagcccagtgaaaaatgacctcctactggaaaaactggaggaatacagaaggctaaaaatagtgaacacttaataccaacagattttctgaaggaagacttcttagtttctctaaatgggaaatcttacattatcctctaaaggaaaaataagcaagtagttgaggaaactatgtttttttttttccccctttttcttgagacagtctcactctgttgcccaagctgagggcagtggcgtgatcacggttcactgcagcctcgacttcccaggctcaagcagttttcttgcctcagccttactagtagctgggactacaggtgcatactaccaggcttggctaatttttgttttttttttttgtagagatgaggccactgtgttgcccaggctgttttcgaactcgtggactcagtgatccacctactttggtctcccaaagtgttgggattacaagtgtgaaccaccacacccagcccaagtaatggatttttaagggcctcagttgcataggagttttttattcaggcygcaaaattcctgtgttttattatatattcctttttatctgtattttctattcacaattctcttgtttccatagaccgcctttttcacatatatccatatatttatacattttgttgtaaactctagtctataggtatttttaattcacattgtatattacattctggaatgtacaaggaactaacacaaatcaataagaaaacaaattagctttagacattgaagaatctcccccaacccatcgtctattatttttgtctatggtgactttcgtttaacagaaatccttggtttttatgtaatcaaattcattgtkttttttttttttaaattaagaggttggtctttttgagtcttaagaagttccttttcattcgaagtcataaagttcttcccaataaattatacaataagtttgtcaggtttctgaaaaaccaaagcagatgtttttaaacagcttttgatctcttgcctatacggtggctcaacaaacaagatgccagaatttgcatgtgtggggctgggttgttttgtggtaaatagtgaactgtcttaaagtccaaaaacaaagcttattatttctggattgaaaagggaatacagtaagggccccatggaaaagtactaagactttttatgaaaatgaggggtggaggcactctgagtggttagatttgctcaacttgtgtgcactcgctcagtggaggagataggaagaaggacatgtaaataataggatattgattgatattgattaatcattttgccgatgccaaaggacatacttcactgtctgtggaaaagattgcctttttctccctaggaagtttgaataccttttaaatatgaaatttcatgtgcatgacctatttccccactgccacacctcatgctcacactaggcttatgattcagtcacccacttaagttcacgtgatgtcatttcagggagaattgcagctacatccttttgagaagaaagcgattcagctgggcatgtaggttagagtctttagttcttagtcttctcattcctcctgtgaaattatctacatttaacagctttcactgagtattttcttctttcactcractgttagaagacatttcccaacctgcaaatatgccattcctgccccaacatgaccaactgagagcttcaggctttacatgatttttcacagcccactgagctttgtaatatatagaacacaatctttagagcttcagtcctygctgtgctataataccaacataataagagtagctaatatttatcagatgtttactatacatcaaacaccaatgtctcatttcatgacttgtgtgacttaagaggtccagttcttaacacatggtctcattttagtatcacagttctgatgatgaaggcagggctgatgtttcctcatcttgctgaagcatggagaggacttgtctaaaatcccatagctactaaggggagctggggctaaaacccagatttcttgggttttcacaccctgctactattagcttaagcctatcaaattctgagtgcttattggctgataggatagtcacatcatggagtgcctaaattaacactacatgtgaatttaccgtgtcgactatagcttgaaatggcgcccactgcctgatgcctaccagtctttctattatacatgcttcattaagccctaccttttctccacatttcccaagaagtgattttctttggttcttgaagtacttttgtacagatcattggagcttaacttcgttcctttatcaggaagtgttttatctcacctgcaagttcagtaaacacaattagcaagtgaggtggctttggaaaggaatagtacaccctgaaagaaacatagtgcccagaaactagatattggatattgcaaatttttcttttaggttactagagccaccttcctgaagcccacttggagaaagtcactcaaaatagttctgtgaccaccatttagccccagttctcatattgtatacttgagactctggacagtaagacgaggcagggttgtaagtttgcacccaataccagcttacaaatattcttacattactggtttgggttttaaattatctttgcctcttctttctcatcttccctcacttttttgtcatttcaattaaagaaatatttgccaagtactgaccttagtgttgctaggcatgagttccaaggagctcagatagcttagaaccagccccatttgacttgagcttttctcgcctcttagcacagaaggaatgggttggcgtcattatggtttgttttgagtaacatgtattcagtctgatatgctatagggagttgttgaaggtgtttgagcaggggaagcaactggtttaaaattgttgtataggaagataaatctggtagtggtgcacaggatggattagaacacagggcgactgggtatggtggtgatctcttacctttgtaggacacttgatagtttacaaggcacttccatagatgtatgatctcatttgcatggatgcaaactagagctcagagaggattggtgatagctggcctgtgtagtaaggggttgaagaaaggggttgtcacagggcgaggaaggtgggaccattgtgcatggcattttagaggccaaatctataaggcttgggatctaagtagatgttggttatcagggagaataaggagtcagataatactgagattttatggttagtcttctgggaagggtgttgccatttacagaaatcaggagatgagacagagaatatatgcaagtttggttttgaatattagattgaggggcaggtgggtagttgaggtagccatatccagtggacagtttaaaagctgggtctaagattggggccaggtgtttttgatatttagaaggtcattggtgactttagaaagtaatttcaggagagtggtggaggaggaagccatgtcagaaggataagaaatcggtggttgctgaggtggaactgtgggagtgggaagggctagatgagggagcagtgggaggtgttggtcatcatgmgcttttccttaggtacagaaagaagggaaatagagtgagccagactgcaagaggattttgaggtggagagggtgtgagtttgaggagcctccaacagaaaacttctttgtacgggattaggtgaaatcacttgtggagtgaggaggaaaaggatttggtgctaaaaaaaaaagtagaaattgggacagtagatgttggaagtattgagggaggtcaagaaaaggtgaaccaaaggaggctgaacgttgcaagttttcagtgactccagtcagcatagttttgtggctttccagtaggtcgtagaaaccagaaagcaggattagaaggagtaagcattgggcccttttctggactgggaattagaagtcaaggagcatggggagagttgagaagttcaagggtgttagccagttattatttcatagttgggcagaggtgagtaaaactctgtttgcaggccattattagttctggcaataggtgagggagaaggtcaaagctaatattttaaagaatagtttggaattattgatggttttcaattatctctgctaaatcattttatttagggagtatctgcacagaattaacaaggaaagagagcaaagtcttgtatcactggcccattattgcctgttttcctcatctgtaaaacaggagtagtgtagcctaccttcaccttggtttcgtgcttcaccaggaattttgtgctgtgtgcaatcttgtattaggcattgtcacgacttaatgacctttttgggcagcgttttcctrtatagagttatgagtgcatcttttataaactccatttactccttattggagattattataaatttctctaaagctcctccctcacacatctttttcacctttcattctttgaagtcaaactttcactttctttaaagaaggtctgaagaaaaccctgcgggatgagatcaatgccattctgcagaagaggattatggtgctggatggagggatggggaccatgatccagcgggagaagctaaacgaagaacacttccgaggtcaggaatttaaagatcatgccaggcygctgaaaggcaacaatgacattttaagtataactcagcctgatgtcatttaccaaatccataaggtaaagtattcccaggttcccatgtgtattcattctgttattctgcaagctgtttcatgtatcagggcaggctgctatgccgagtgctccggagaataaagaataaagaggcaatttattcagaaagcaggttttggacatcaaataaaagttatgtactgtgttaagcactcaggataagggaatgaggtaggtaggttttctgcccttgaggcatgtaaactctagtgaaaaactatgagaatctggacaaataagggttttcacactagtgagtgtgagaaaactatcttatttaagttactgcaacagccctgatgaagaaatgcttaaaggtggttggtatcttagctttggctgctgtattacctgttaccatagactgggttatacaagcacacatttatttctcacagttctggaagctggaagtccacagtcaaagtgccagcagatcctgtgtctggtgagggccctcttgtttatagatagctgtctttgtatctacatgacggagagcagagagagaacaaaaaactctcatatttgtgcttataagggcactgctgtgttctcaatgtttgtgtccccatgagattcatatgtaaaatcctaatgcctagtgtgatggtattaggaggtgcccttataaaagaggctcaagggcgcttattcaccccttccaccatgtgaagatacagtgagaagatgctgtctatgaactagaaagctggcgctcacccattataaaattctaagatacaattatcattcatgtattttgtattttagtctagttttctatacttggagtttaaaaaattaaattgggattacattgcttcgtactgtcttataatttgcattttttacttatataccatgagtattaaatattctggaacatggttttaataacttcataatctattccatgtatatatcatcatttatttaactaatctccttattcctaggcattaagtttattttcagtttttcttgttcttttaaaaaaaacttaaattagttcttataaaacaaatctcgtagataatacattcccatttgaccatactctaaattgctattttttccccagagataaccactgatattagttggtgtgtgtcgtcccagattcctttgttaggcattttcatatatgtgtatgtgtgtatacgtgagtgaatatatatatgtagaaaactcatagtactctgtgtatgtttttttaatttaatggtgtcatgctttacgtatcattctatttttttttttacttaacaatactttgcagaatctttccatgtcagtatttgtagatatacacagtttttttgctgtcacatggcatgtaataaagtggatatattttagtttatttagctgtttccctatgggtagatatttmggatgtttgttattgttactataaatgtgcgtatcttggtttttatctcccagtgcttctgcaaccattgtccatcgacttaagaggggttgggtttattcagtattggaaaatcaagggggtcaagggattccaggttgctagtcagattgaggttgagatgatccaaggagtggagccagggagacgagtttcgaagagagcacaaaggagcatcaagatcttcagggtttcagtagggatgtgatgcttgttcagagagactaggagatgtagactgaacaattgtggtcagaggttgagatctctgagatggtatacttctcggtgggcatcaggttctgccaaagcaggaagaagataagggaacagaactaccatttgttgagtgcccattgtgtgccagacatttgatgcattatctttttggtgttgtttttttgagacaaggtctcactctgtcactcaggctggagtgcagtggtgccaccgtggctcactctagcccactgtggctcacttgaacctctgggcccaagcagtcctcctgccttagccttccgagtagctgggactacgggcatgtgccaccatgcctggctaatttttcgtgttgttttggttagagacagggtctttctatgttgcacagactggtcttgaactcctggcctcaagcagtcctctcaccttggcttcccaaagtgctatgattacaagcgtgagccaccatgcctggctgatgtgttaccttatgttagcatatagctaccctgtgaagtagggttataatatatttgaatgaagagactgagactcagagagtttaagggacttgattaagttcttataaccttagcatgttaacattgtctgaattcaagtttcgtgtttatttattcataccacgtgcctttctgtgaaatccttacacctttttgcatctctaccttctaatgcagtgccttactcttagtaaatggtcaaaaggtagctgctgataatggtggtaatgaaagggcatgtttattctgggggcacaagaaactctaaagctcataattgacattataatctcttgttgcaggaatacttgctggctggggcagatatcattgaaacaaatacttttagcagcactagtattgcccaagctgactatggccttgaacacttggtaagaattccattgttccatgtgtctaagatgcttacgagcgtttgctgcattggtagttgctagtgagtaaagcactggaagctgcagagtcaagctaatgcctagttatctgttgtttatgatgagacagggaaaatggtgtgaatccttccagcttgtgaacacagtggcccattcattttccaactggcttcttttatgggcaagtaataatcaaatataaatgatacttaattatgcagtagctgttgataaaggcataatcattggccgtatgcacacagtattgtgaggcctttttaagtattagatggcagccttggtttctttcttttttaaaaattgtgattaaataacactaaaatttatcataattatttttaagtgtacacttgagtggcattaagtacattcacagtattgtgctatcatcaccactgtccatttccagaactttctcattttccaaaactgaaactctgtacccattaaacaataccttcccattctacccccaactccagccccagcatactctattctactttctgtctctatgaatttgactattctaggtaccttagatatgttgaatcatatagtatttggccttttgtgactagtttgtttcacttaatgtaatgtcctcaaggttcatccatgttgtagtatgtatcagaatttccttcctttttaaggttgaataatataccattgtgtgtatataccacgttttgcttattcatctgttgatcatttgggttgcttctacctttcggctattgtgaatatgcaatgttgctatatacatgtatatatagcatgtattcaagtccccacattcaattttttgtatatatacacagaagttgaattgttagatgatatggtaattctgtttaattttttgaggaactgccatactgcttttcagagtggctgtacctttttttttgaggcagggtcttgctctgtcacccaggctggagtgcagtggagtgatctcggctcactgcaacctccgcctcctgggttcaagtgtttctcctgctttagccctccaagtagctggggctacaggcttgctctaccatgccctgctaatttttgtattttttgtagagacagggttttgccatgttgcccaggctggtctccaattcctgagcttaggtaatctgcccacctcggcctcccaaagtgctgggattacaggtgtgagccaccgcgcctggccggctgtaccattttacattcccactaacagtgaacaagagtgtcagtatttccacatcctcaccaccatttattttctatttttttaaatagtagtcatcctaatgatactattggcagatttgatttccttttaatcgacatgatgcttccatatttaaattttataaaaccttgatgatagaaatatatggtagatgctaatgtccccatttttgtttggcatgtttccagacacattactctgttttcaggtaagcagtgttttccagttacttttgtgtcattttagagcagaagttggccaacgttttttaataaagggtcagatagtacatatttcggctttgttagctacagacagtcttttgcaactgctcaactccatcatgtagtgtggaagcagctatagacattatataaataaatggacttactttatcccagtaaaactatttacaaaaacaggcggtggacccaacttgccctatgagccagagtttgccagtacctatttaggatattctggttgttaaattcctggatgtggttattcaagacacataggatcttaggaattcaaaggaacttgaaaatcacaagtctagtttctcctgacttggtctgtggaagagcttctggagggccgtgaacctccttaaatcataggcaacactatgtgtgtatgtgcatatttgctttttatttcctggtaagagggttcatagtcctttatcaaattctcaggtggttaataatatgcaaaaagttcagaattactgatcccaactgttgtacatgaatcaaggcctggaaaagttgctgtgggaactgcctggccaggcagtgacagactagtgcttgaacctgcgtgttttgcctcttaagcctatgctctttccattgctttatttttttcttaattctcagaatatttaactacgtaagttattctctgacatgctagatgtctagggattgccctttttactggctagctcatggtttgggaggagaacctaaaagcagttcccaaggactcttgtctttccttgctgcctttcaagtctggagctgatatgcctgcttggctaagatttcactcagacctcagattaattcactctacattttgttactgaagaaaactgagtattagatggtcatgaatccattatttattgtgcggaggaaaagaaggacaagctaaygtttgtggttgataygttaggcctaccggatgaacatgtgctctgcaggagtggccagaaaagctgccgaggaggtaactctccagacaggtagggaatgttcttctctttttttgcacacgtggttcctttgatactgtcagctataatgtgctgtccttattgcagtttttccttatgtggcctttggcttacgagtaacrctgcagagactgtattttacatgtttgtagattacttctctgcagtttcataatcaagcactcaacatctttgaattgatgccaactctgtggtccttgggctcggaatttgctctttcaccctgggttagcctgactttrtagctaggcccctgacttccttgtgtatttagagctgaaataatttatgtctctttggaagcacatcatcatgtcattaaaagtaacagctggctgttttgatgatcttggctgttattaggataattgatctcatttttttaaagccaccctcattcccatgattggctgatataggtaaagatattgcctttcaagcattttccctttatactattgatgtccttgaaggctctgtgaagcacacaaaaaagtgtggcattagattcagtcttgcttggacttgaaaagtggctcctgaaataactagcctcctggctggatgccatcagaacacttgggcaccagctggtaggaggctttgagggagggaaaggaatataagaaatatatgtagcccyttaagacttggaaacgtgaagttattgccaacaggaaagcagaattgctgtgaagttatacacagcatactaatgaagaccaaagcaggaactctgtttctaagagataatgtttaaattcatggaaatgcatagactattactccaacagagtcacaggtcagaggacactgaaccagctaaagcagggagagagaaggacatttttcttatacccacgttattggttagctttggggatgcaaaagaatatttgggcctgtaacctgttcaaaagctggtttatcaattagctgatagtcctctccagttaaattacaaagcatagcccaggttattgagtggctaaagtcatcaaaggtaatgagcagtacaaccctggcttctttaggaatgaacacaacttgctacaccatttttagaagcacctggacttcagggcagaggaaaagttattaaagaaagatttgctctgcttcatacttcaatttcaggctttataattgttaatcctgatttagtatttccttctagtgaagggcctgcaatatggtactagagagcatttcaagttaaatgctactgtaaggtgattttgcagaacttacgttaagttcaaaaccttcagggcttcataaaaataggaagagagggaatttgtccaaacacagctgtggtgatagaaaaggattacttactgaaatgttttagttagttgtgtgagaattgagagttgtggggactggtttcgtgatgatatgtgtatatctcctatatggcataatttccttagtgggatctggggcagccccatgatcaaatatatgtaagcagaatctatgaatcatctaagttggataaagactataaatagtctctcgttagtttaggagaggtcaagttttattgtcaaactgagaaaaaagtttgggcttttagagctttttggatttcagagttgtggacaaaagattatagacctgtgttccagaaaaaaatcttattggctattcattcacgacaaaaaatgttcagccacttagagatctcacacttgtttttcttttcccaaaggaattaagaggtttgtggcaggggctctgggtccgactaataagacactctctgtgtccccatctgtggaaaggccggattataggaacatcagtgagtatttaccacatataatcattgatcttggggaagtactccccaagcttcagtaagctataaatctgtaaaatggaatcaataacaggatctaccttagagttactgtgatttaatccatgtaaaacgtgtacagcagtgcctggaatatagtagacatctaaatagaaagttagctatgatgattattattatttgaacttgctttcaaatatatatggtggtntgttaatgctgctttgtcagctgtggaaataaaaccaactaaaataaagctgtaaactcagaagttgaacaaatttggatactaggtttgtggtctattataaaatagcacacaatatcctcatttatcagaaggcagtccaaactatctagacatctgtattagtccattttcacactgctgataaaggcgtacaagactggacaatttacagaagaaagagaggtttaatggacttacagttccatgtggctggggaagcctcacaatcatggcagaaggcaaggaggagcaagtcacgtcttacacggatggtagcaggcaaagagaaagcttgtacagggaaactcccccttatataaccatcagatctcgtaagacttattcactcttataagaacagcacaggaaagacctgcccccatgattcaattaccctcaccaggtcccctctcacaacacgcgggaattcaagacgagatttgggtggggacacagccaaaccatatcaacatgttagcattatacatgttataaactaccatatataaacatacttatattgagatctgacaaaacatccaagtatctaggtcaatttctaagcatcaagactatagaaaacaaaaagcattaaaatatcagagctgaatagtcatgataccatgtctggtagtgcagtgggtggagatgatgagatcaagcaaatatggtttgtaggtttttggtttatggaactttgtgtgctgtgataccacactttttcactaggagttgttcataccaggcttatgtgttgttgatgctctctttggtctagacctgccagtggggagctaacttacccttgctcttgggctgtacaaggtgaagtacggtaagtcttcacttaacgtcattggcaggtttttgaaaactgcatctttaagcaaaatgatgcatagcaggccctcaaataatgtcatttccttcaacagaatttcattataatgttgattagaaagaaaatactggttttgttacatattgtctcagtcaaagttgcaatttctgagaacctgtcaacgatgttacaagaggactttgttgtgtaggcttctctgttggatatctgagcattatcttggctwactgcagcctccacctcctgggtttgagcgattatcctgtctcactctccccagtagctggggctacaggcgtgtgccatcacgcctggctaatttttatatttttaaagtagagttggggtttcaccatgttggccaggctggtcttgaactcctgacctcaagtgatctgctcaccccaggcccccacagtgctggcgtgagccactgcactgggccaacccaagacatttctaacaaaaattttacctaggagtgattgaacactttttgtttgagactgaaattgctcaccagacaggtttcttctctgacagagttggtgtaagagcagagacaaaatctgcgggcttgcagccctttatcacagagagtgacttctactcaacctgtgacctctctgcatcagtgtggcatgtttctcacagccatctcttaaccggttgattgaaatgagctatggaaagaatgatatgtttcagagatgttgaatggggggtacatgttcaagaaattcatacgccttccctctcactcctcagctcatacatgggaagtggaagttacgtggcaggtgtttaggaacagctgccttcagcttacttgtttaccttctgtccctgccacctttctttatttggtttctyacaaaagatcatgttcttaaactatgcattgtaaaccagcaatagttcacaggtgccagacctacactcgagataccctagggccattcagaggatattgatgactgatgtgctgggtgtgatttattttttgcagcatttgatgagcttgttgaagcataccaagagcaggccaaaggacttctggatggcggggttgatatcttactcattgaaactatttttgatactgccaatgccaaggtgagttaagggagaaaaaacagacaaggctggggtaagggctgtgggtgagtcccctaatgtagggagaagataatattagccattatcaaagttaaataaattacctgtatttgctccattttattcttgagtatttttaactgaggccagtacaataagaaaaactttaaacctgcttttgaagcttttaaaataacttttttctaattatgaaaataaatattttcatatatagctagtataaatgcatatatcctgaggtaatacatgctgctggttctaaatttgaaagatacataaatatatggagtgaaaagtgaatatcctttcctttcctagtctctagttatccagctccctttcctgatacaaccactattaccagtttgggggtcctgacagatgcgatacagatataggcatgtgtgtatgtgtgtgtttgtgttccttacatacatgcaaaggcacataagtgtatatggrgagagaagcaaatatccttatacatacgtttttacacagtgtatctgtaggatacatttctacaagttaaattgctgaatcaaagggtatatgcgttgttaatttttatctttagtgtcaaattaccctcatttgygactggactcatttatactcccttcagcaagcaatgtacaatagtcctggtttcacgacaccctcactagcactgtgtattattaaactgtttgaccttttccagtttgacaggtggtacctcactgtagttttaatttgtatttttcttactactaatgtaattgagcatctttcttcagttttagagccatttatatttcattttctatgatttatgtcttctgtcctttttttctattggactttggctttttaaaattgagtcctttactgaggaawtcaggcccctctcaataataagtagcagctcctgtcctccagtttgtttgacatttgactttctttatggtggtgatggtggtagtgttgtgttattgttagtttgtgtgtgcgttttaatggtgtaggagaatttttcttaaatgttgtgtggttgaatttacagattctatttttttgttgtgggagggggagactacacttacagagccactcctcagttgaagagaagaaaaaaatggaaaaatggccttttcctccgtagtactttacagtttcattaaatgtttcattgttgtgggaatcagaccacaggtccagaatttttgaacttttcaaaaaaatcgttttctaaaatacttgcaagcaggaagaacgtagagagccactaccagcctgaagctagatgaccaccctacctcattcttaacacatcactttcactgggttcttttttatatrtctttttagaaattgttttgtgaatctgcagtaaacaaattataatttgaaaaggaattcagatacacattttgaaaatgagagcagtaacaagataaggaatatatctgaaatgagattcgtatatacatctggagagagtcacggtattgttcagattagaaataagagggattaacaggagggttaagcattaaggataggttttgttgagtttctaagttttcgaatgtgtggcatacattatgattatatggaactaatgtccctcacggtgcatcttgtatttattttggagtgagaaatagaatcgagagctaacttttttcctttaaagtttagttttcctaccaccatctattaaacatcctgttatttcacagtgataggaatgatgtggagcattatccttatcatccaaaattctggagtgcatttggatctagtgttttctatcaatctgtctgctgatgtggcactactgcaccatttaccacaacattagaatatgtctgagtaactggttggcttagattttttgcattgagtcccaccccattttccagaactttcatggctattcttatatgtttgttttccgtaagatctttaggatcaatttgtctagttctaaagaggaaattctgatattattgatttagtaactttccatgaaaaaaacctaccatcacaggaaagatgcacattaattacaggttgcattctgatttcagagaattaattgtgaaaacatacatatcttagaatcaagaaatataatgataaaaaagaagatccattatctggaacttaaaatgtggactgaacagcacagaatgacataggatttgtacctttactacctaatctaagctcatgctgtttttcgcaatgatggatactgttggttcatatacctaccatgtgtatgaaaggatgtgaaaggcagggacattcttatttatttatttttgagacagagtcttgttctgtcatcagggctggagtgcagtggcataatcacagctcaactgcaaccttgagctcctaggctcaggcagtcgtcctgtctcagcctcctgagtgttacttatttatttttaatttttattgaagaaaggaagaaagaataccccttcagctcctcctcagtggaaatactagttcctaggtgaactttcagtcagcttttgttttgtttcaatatgcacagtattacacttgagaaaggggtgctggggttgtgccttataaggaagacacttcttcccagagagcttgatgtatatcttatctgaagaggtcttagaaaagggtgcattctaatcaggaagttagactaatcttggacacactctcagaaataaagacgttctttcttttttccctgacaggcagccttgtttgcactccaaaatctttttgaggagaaatatgctccccggcctatctttgtaagttctaaagtgtttgcacaatacatbcttttattaataattgtccttttgagcatgtttttcccccgctttgcatagtagaactattaatggtatctttagaactcatctactttaacttccattgttcacttcccttccaccacttctggaccaataacagtcttatatctggagaggcaaggaaaatgaatctagaagtagctgatggaaggcaaactgttcaaaagaagcccactgtattggtccttgaagccaaaggcttcaaggctcagtctcattagggcccaaggaggggtggacttgcatgctgatggccacatacccaacacctaagacaccagactgccaatttattaactcagtaggcagacctctctgcgagtcctaaaattgcttggtgagaagcgaattgaatcaaaacaagggtgttagataaatccartgtttaacagcaggaggtcaggatgacttgatgttatctctgggaaatctgcctctaatgagactggatgtgtgaattccaaagttgttttggtcattgcttttgctacagtgactttcccttgtctctgtttctgtggcttcctgcctctttccctagtctcttggcacatgtctgttctgactnttayagaaagtgccccctttgaatttgagttccacatttcttttccttgtaaaagagcaaaggaagtcagtgtgttcattttattttgcctttatatctatattcttaacttgagtctgtattgttgactttgtttactttgtcaattcagatttcagggacgatcrttgataaaagtgggcggactctttccggacagacaggagagggatttgtcatcagcgtgtctcatggagaaccactctggtgagtgatccatctttctgtaacttcttttcttttttggggaaccttttctgatggctgtggagtgtgacctgggaggggattgcttctacrtattttcactgtaccacttctgctatattgactttcctttaagtactttcagacttttccctaaaggtttcagaagatcgctgcctaaacgggtcaatttgagggactgggagagttctcatacttacaaatggttgcctgttttctgtaggcgtgccccttatagtttgcagtgctttgcaaattttagggcagtgacactccctatttatgaggcaaccagaagcaatctgtcatggaataaggtgggaattctaaagctcaggtttttatctgtaaagtgaacatggcagttggcatggtggtgtgggcctgtagtcccagctacttgggaggtggaagcaggagaggatctcttaaggccaggtgttggaggctgtagtatactatgatagctcctatgaataaccactgtatttcagcttggccaacatagcaggatctgtctctaaagaattaaattaacatgacttttacaatctgcttaaaaataactccctatttatattttatttttcatatccaaatgtkttaaattgtgtactttgagtgacatggaagagtatcwgagtatatatgctgttttttgcctggactttttttatttctgggcttttttcttctattcctactgcctggaagctatgctggtccccttccccctttcccccctttccctcctccatacctgttcactctgctgacttcttcttagcctttaagactcatctcaagaatcttccctccagagaacattccctctctcactagcgcaggtcgatgttcttcgtttacttttattttagcttttgccataaaaagtaagagtaatagacatttgttgagagtttgctgtgtgccaggctctgttctaagtgctttatgtgaattctttaattctggcaataacaccttgagggtaggtactggtattaatgtccccattttaacaagaagggtactgagactcagaggttgtaactcgcccaaggtgaagtaaatagaggatctggggacaggagcatgcttttaacccctgtgttagatcacattttatcaattatgtgatgttcttttttttcacacttaaatgtttataattacagggtgcatcttacagttgacttaatgtcatattgtgatttcttaaaaggtgctattaattttaagtgcattaatagacatttgattgggcctgacgactaagaaaatcattgtcttgaactgggttgtgatgacctcctttacagcttatgagtttttcctgagcagtctcttcatctttatttctgtagtgtttagtggaattcttggcacatagtagggatgtcataaacgtttaacaaaaaaactgagggtaggaaatgtagaggtctctgaagacaaactttatctagtttatttaaatttttgtgcctatctgtgagtatttggagcattcctcccttcgctttctcttttcccgcccctttgctaagtctgaatttgttatgtggttaagtaaatgacactgtaatggatatatgttactcatgatgtatttgtcaaaacccacaaaatatacaaaaccaagaatgaaccctaatgtaaaccatagactttagttactaatcatgtattgctattggttcacattctaataggtgtaccacaccagtgtgagatcttaataataatgatatagtctttcctagcgattaggtaaaacctctgtgttgtcctgggtgtcactggagtctttagtttgcygacagttctcaagggccccttagaggacgttcttcctgccactgcctcacctccaggagccccaagatgaggttttatcgaggtctaaataatttatgtttttatttcttaagcaaacattcagttctgacttttgatccactcagtggttaattaaaaatttttaaaaataatcctttctatgacttcarctacagtccattcacagagagaatgtatttgctctctatttcgttaygaatcttacagactgtaggggcagatagaaggcagcaaataatatgtgaaaaggatacattttcttacatatatgtaggaaacttttgcttactgacttgtgattatcacgaactatagaacagtgggatagagcctttatattactggtaattcatcaaatatttattgaaatactactatatgtcctggaatacagtccaatctggaatagtccacactaggagaaatgcataagtgaattaaaatataaaatacacagtgctatacagaactatgaataaaaatctggcaatacataggagtaatggagttcttgtagaatttagagacagcttgtaaagaaggtgacatttgagctaggttttgaaaatgggagacagagttttctttttttcttttgagatggagtctcaaaattctctcattatcaacagcttgcattggtgtggtacacctattacaatatgaaccaatatcaatacattattaactgaagtctgtagtttaccttagggttcattcttggttttgtatattctgtgggttttgacaaatatatcatgagtaacatatatccattacagcatcatacagagtagtttcattgccccaaaagtcccttgtgctccagttatttattctttttcctggcctgctggcaacaaatcttctcactgtcctatagttttgctgtttccagaatggtatatagttgagaccacatagtatgtagccttttcacattggcttctttcacttagtgatcttcatttaaggttcattcatgtctttgtaggctcgatagcttatttctttttaacgctaaataatattccgttgcgaagatgtacggtgggtttttttcccattcatgtattgaagaccatcttggttgcttcgaagttgtagcaattacaaataaatctcccatggcctttccatgctactcacagaggggtccatccggcgttgttctggattcccatgtaacttaaagggaaactttcacaatgtccagagcccctgatgtcctgcaaatgaaagaggaggatgtccttaagttccttacagcaggaacccatttaggtggcaccaaacttgacttccaaatgaagcagtacatctataaaaggaaaaatgatgggatctacatcataaatctgaagaggacctgggagaagctacagctggcggcttgtgccattgttgccattaaaaaccctgctgatgtcagtgtcatatcctccaggaatactggccagagggccgtgctgaagtttgctgctgccactggagccactccagttgctggccgcttcacttctggaaccttcactaaccagatccaggcagccttccgggagccatggcttcttgtggttactgactcgagggctgaccagcagcctctcatggaggcatctttatgttaacctgcctaccattgcgctgtgtaacacagattcccctctgcgctatgtggacattgccattgcatgcaacaagggagctcactcggtgggtttgatgtggtggatgctggcctgagaagttctgcacatgcgtggcaccatttcctgtgaacacttgcgggaggtcatgcctgatctctgcttgtacagagatcctgaagagattgaaaaagaagagcaggctgctactgaaaagactgtgaccaaggaggagtttcagggtgaatggactgctccagctcccgagttcactgctactcggcctgaggttgcagattggtctgaggcatgcaggtgccctctgtgcctattcagcagtttccagctgaagactggagcactcagcctgccacggaagactggtctgcagctcccrctgctcaggccactgaataagtagcagcaaccactgaatggtcttaagctgttcttacctgggctgttaagtaacatggaaataaggctgatggaaaataagcrtcagtttcttaaaaaaaaaaaaaaaaagtttccgtaaacattcatggcaggtttttgtgtagacataagttttaattcatttgggtaaatagcaaggaggggattgctgtatcttatggtaagactgtgtatcttgtgagaaactgccaaactatcctccaaagctgctgttccattttgcattcctaccagcagtgaaggagagttcctgttgttccgcatccttcccaacatttgtttggtggtgtcagtttcagattttagccattctrataggtgtatagtggtatcttgttgtatttgcaattccttaaaaacatgataattttgagcatcttttcatatgcttacttgctatctgtatatcttctttggtgaggaggctggtcagctctttagacagtttttaaaattgcgtttgttgttgaattttaagaattctttgtatattttggatgcaagtctgtcatattctactttctatcgctataacagaatacctgagatggtaatttataaagaaaagagatttatttagctcacagttctggaggcggggaacttcaagattgagtagccacatctggcaagggccttgtgctgcttcgtagcatggcagaaaagtgaaagggcacgttagcatgtgtgaaagagaggggacaagagactgttttgctttataacgacccgttcttgaaagaactaatttattcccttgagaactaattcagtctccagggaactaacacagtctctggagaaagacagtaatccatcttaatgatctgatcatctgtaaaggccccaccttccaacgctgtttcattggcatttaaatttcaacatgaattttggcatggacaaaccacatccaagctatagcaaatcctttatcagataatgtgttttgcaaatattttctcccagcctgtggtttgtcttctcatgtacttaatactgtcttttgctgaacagttttaaatcttagtgaagttctagttaccagttttttttctttcatggaccctgcctttgttgttttacctaaaaactcattgccaaacccacgatcatctaaattttttctgtgttatttacaaaattttaatcgttttgcaatttatatataggtctgtgttccattttgagttagtttttgtgaaagatgtaatgtctgtctaaattaactttttcaaatgcagatgcccagttgttccagcaccatttattggaaagaatatctgttctccattggattgcctgtgtttctgtcaaagattagttgaatgtatttgtgtggttctatttctggactctattctgttycattaatctatttgtctcttcttacaccaattccacattgtcttgattgctttagctttttagtaagtcttggagttgggtaggtcagtccttcaacttttgttttttctctcattattgtgttggctgttctgggtcttttgtctcgccatataaactttagaatcagttcgttgatattcacaaagtaactgctgggattttcattgggattctgttgaatatagatcaagggtgagaaatgatatcttaacaatattgtcttcctcttcataaacttgaaatatgttttcatttatttagatccactttgatatcttaaattggaattttatagtttttttcatatagatccaaatatttcatttgttttggtgctagtgtaaatggttttgtggggttttttttgtttttttttttttttgagacagcatcttgctgtgtcactcaggctggagtgctgtggtatgatcatggctcactgcagcctcaacctcccaggcttaattgatccttctacctcagcctcctaagtagctgggactacaggtgtgcgccaccatgcctggttaatttttttattttttgcagaggtagggttttactgtgttgctcaggttggtctcaaactcctgggctcaggtgatccacctgccttggcctcccaaaatgctgagattacaggcatgagccactgtgcctgtcctgtgtttttaatttcaaattttgattgctcatatctggtatataagtaaacaattgagttttgtatagttaccttgtattttgaaaccttggtataattgcttgttagttcaaggagtttttagtgattctctgggattttctacataaacaatcatgtcatttgtgaagaaagacagttttatttcttcctttccaatccgtatgtgtaccttttactttctatcttttcttattgcatagggacttcaaatacaatattgaataagagatgagagtggatatccttgccttgttcctcatcttagcattaaagcatctagtttcacatgattaagcatgatactagctggaagttttttgtagatactctttatcaagtcaaggaaatttccccctattcctagtttgctgaatttttttaatgaatgagtattggatgtttgttaaataaacttaattttggaatcatttcagatttgcagaagagttgcaaagatagtgcagagaatttctatatattctagttttcatgttaacataatgcatgactatggtacttttgtaaaaactaagagtatattactataggttgagtatccctcatctgaaatgcttgggaccagaagtgtttttggattgcagagtttttcgaattctggaatatttgtactatacttacagtttagcatccttaatctgaaatctaatatggtccagtgaacatttcttttgtgggtcatgtcagttctcaaaaagtttcatattttgaagtattttggatttccagttttcagattagggatatttaacctatattaactaaactgcagactttattcagatttcaaggattttccactgataatctgttttctattcaaggatccagtctaggatgccacattgcacttaggaatcacagtaaaaggaaaaaagtaaaatgtgataacattagagatcacatagtctagtagcttcatagttggttcataaattctggaagacctcaggcccaccacccactgacaaccttatagggtagcagggactctgcctgtggggtagagcataagtcctggtctggtctcgtggacttcaagagtggcttcttgccaccattctgtgttctttctgcctccaagatttccttttcctttcttttaaattttgctttcaggtcagatcyttttttttttttttttttttttttttttttttagcagkgttagtttgctgacatttctgtaccatagaataccatgtgaactgatttraggagtccacccacaggcagcgtctttcagctgtaggattatctgaatggcaaaaatctttagtgctgcaggggacctcagtgagatggctttgatggtagttgaataaaagtgctttgaatgaggagatttattatccacttggttttaratatattgtctccatatataacttatatgcataaatatgaatgagagatgatgcttttaatatgttttttctgtttttctagcattggattaaattgtgctttgggtgcagctgaaatgagaccttttattgaaataattggaaaatgtacaacagcctatgtcctctgttatcccaatgcaggtgtgtgtttcaagggggtcacacatggggagataaaaataacataagacatggcatagatgaggtaagagatcttgaataaaagatcttgttttgccggtgttggtatagttgacacttaataaatgaagagtgtctgggtgcagtgtttccctgtagacctgagggaagttcggctcaccctgaagcttcagaatagtacagaacttccggaaatgagcttagtcacataactgaccagagctttgcctttggtgacagcacaagcctkgtggacgtgaccagaaagatgggtgtaaggaagagaagagagacccctttctctggtccactctgttagtagaagagcaaaagaagaatcttgtgtggtgttacctttttcttctctgaaagcttggacttgcagttcattatatggaaatgttttgaagatatttgtagacagttctcaaactgtcccattaaatattggtaatttgttcagggttaaccagatatccctgtgaatgtatttgagcactgcttagctacttagagcaaaaagtcattttccagcctcttttctccaaatgtgtcattttaatgcacaataaattttatttcccaccaggagtaagataactggaagcagataataaataaaacaagaaactggattgttataagctgaagtcttacttgggaaaatttatttgaaaggagactggttgatttttgtttgtttttaatggcatgttagttgcgcattagttcaaaggttatgtagtattccttccacccccacccccaagcggctatgtaacaagaatgaatgaatttcccttatgggaaggggtggggttgggggtattctgttctgcctaacagtgaatattttctttcaaacggaaaagaaataatggagttcattttcctctgtgattttttttttttttttttagttttttggggggtgtggtatctctttgtttactgtgtgaatattatgtgtttgtttttgcaagtagtcaccatttaatataaatataaaattatatagttattaacataaagtctttaaaaatacagtgtatatttttaaggcaatttgcaataatggttgaattatcctttctcaggtcttcccaacacctttggtgactatgatgaaacgccttctatgatggccaagcacctaaaggtcaggggtccccctttcactggctttttaagagagacagaaagattgaattttagatttagagtatttagaaggagaattttccctgaagaaatcccaatgtacatataacaaagaaaagtttagctatcccaaattaaggtactagaggcacaggggagggctaactgtcagcatccttatcctcagctggcactagtggctgctggaaaattctcgttgaggtccactccaaactaattgagacttggctctcctctgagatgttgcttcccctgcagccttcccaaattgtagctttctgccctcacacccctcagactgctgggtggagtagatgtccccctggccgcccattgtcacctccatgattctcgctgtctgtcatacactggccattgttaaatcctaggtcatgagaccatactatccactgctgcttcttattgcacttagctactaatccctgggtctctttccccttattccttgaatttttagcttctgtttcactgacattctctcttaggctatttctgacttacttcttatgatttcattatctttgtagacaatctttccaatactcttgacttctcagctccttgactttgtctcttagttatggtgttctttattcagtagcctatggttaaactctagtctcatgctgtcccatatgtagccactaccatatggtttttggagcccttgaattgtggccagtgtgacagaggaactgaattgttatttaaacattttttcaattaatgtaaatttaaaaatcaatactctattttgtgttatttgaaaatgtgttatccaactcatattcattcagctcagcatgtgggtaaaaaagtcattagataggcaaatctcccactgaactttattttttgtgtttayttttttgagacagggtcttgctgtgttgctcaggctgaagttcagtggtgtgatcatagcttactgtagctttgaactcctgggctcaagcgatcctcccacctagcctcctgagtagctgggactataaacacatgccaccatgcccagctaatttttaaattttttgtagagatgaggtcttgctatattgcccaggctggtctcaaattcctggcctcaagtgatcctcctgcctttgcctcccaaagtgctgagattataggtgtgagccaccataccyagcctctcactgcattttaaatggtataaaggatttcacagcatctgaactattctttgcttttatcctatgtctagggcatgtgatatctttgtatctagagttaagtatgtttgactctctttttagtatagtcttagttattcaggaagtatagacggcttttatgttgaattggtggtaatgagtttagaattcaagtgaacttgctgaaactttgtctcttcctaaatgcaggattttgctatggatggcttggtcaatatagttggaggatgctgtgggtcaacaccagatcatatcaggtaataatcacctatagacaatatatctaaaaccaagtggataatcaggtaataatctaaatatgtactttttgttatgggctgaattgtgtccttccaaaatttgtatgttgaagttctaacccctactgtttcagaatgtgggctgtatttggagatgaggcctttaaagaggcgactaaggtaaaatgtcatacaggtgtacctaatccaacatgattggtgtccttttaagagcaggacacaaatgcgcacacagaggcaagcaagaccgtgtcaagacacagggaagaatagctatctacaagacatgaaagaggccttaaaagaaactaaccctgcctgacgccttcaactcagacttctgtcctccagattgtgagaaaatacatttctgttatttaagccacccaatctttggcactttgttatggcagcccttcctaacaagctcatacacctttatattatgaaacattttagagaaataataaaatggacctctatatgcctgtcacatggttgccataattttcaatgtttttccattcttatttcatctatccctcaacttttccccctggattatgtaaagtaaatcccagatattatgatattctatccttaaatacctgagtaatatttgaatgctcaaagaggacagctcatatttattgtgggcaaatacaggcctccattagattctctcatggagggaaaagacgataagacaacaggtatcttgaggtcaggagaagtgtcttcacattgcctggtacacagtggttgcttaattcatgttttcaagtgtgcatatgaaggaagggagcgaaacaagcatgaccatgtgtttaattccttagagttttatagcttataggaagattggaattcagtgaaatggaacattgtttaggactgtttatatttgttttttccctggagtgactgatgatcatatttccagccagtcatctcactgttccaagtctgttttcatgtgtgtcatatgttcactctactgagttaccttgtagttcactgcttttgttgactgatgtgatagactcttagtaaataatatatatatatattttttgggatggagtcttgctctgttgcccaggctggagtgcagtggtgcgatctcggctcactgcaagctccacctcccaggttcacgccattctcctgcctcagcctcctgagtagctgggactacaggtgcctgccaccatgcccggctaattttttgtatttttagtagagacggggtttcacctcgttagccaggatggtcttggtctcctgacctcgtggtccgctcaccttggcctcccaaagtgctgggattacatgtgtgagccaccgcgcctggcctaaatgataattttaaaaatatcttgtaaataatttctgaaagctgtcagtagttaaatattgcttatctttggatcagcaactatttctttttgttttgtttcctctttaaaaagaggagttgttttaaatgtctgtgtgtatgtttgtgtatatctatatttatatctgtctgtatatatgtttgcttcttttacttagacattcacattctaatttggggacagtagagtagagcaattcttactggtcctgataaatttagtggagtagccacatttttctggttgatcaaagacatgatttattaaaactgataatgttaaagggagtgcgaatgactaaaacaaatctttaagagtaattattttggagttttagtgctttatgtctatgtaccctccctactgtgtgtgtgctgtagtaaaaacagatccactggacctaattctctcctctcctagcccctctgcttgtgcctgctccttcttgccaaaggtgaaatcctttttctgttcaaattttgagtaggaagcaaggattgtgtgtgtgtagatttgacagagtaaaagacatctgtggatgtggggaagatggaaggaagtttgctgtttgtatttgtgcaaactgtcatatagctccaggttcatgtctcagaaagtaaaaacaacacagccagtgcatagctgatgggcaggcacataaaaggtacagtttatagattaattttctgccttgttgagaaaactaaaaggcatgattgttgctgcacacttgraagtaggtatataattatatgtatagttatgttaaatagacttaattttatagttaaaattagttttgaaattagtttcattaaatatattttattctgaattaatggatacartgtttcctctttcaactcagggaaattgctgaagctgtgaaaaattgtaagcctagagttccacctgccactgcttttgaaggacatatgttactgtctggtgagtcataaagacctggtattcctgattgcagaaaccatttgtggagtgtgagtattctaagtggtagtgatgtttgtgctaggcagcttgcttattaggtcgaagaagaatccatatattcttggcgcttaaatgaattctagtgaagaaccctttgtttttccagggctggggcaagatgmcgtcaactttagggtaaaagtgaaggaaggcccaggtgatttgcccaggtagagtccttggtgggagctcgatggtcctatctttattgtccactgttttgaaaacatactcttggccacagcctaacaattttaattttcaggttgatactagttactgaaaattccaaactgccaaggtgtaatgtttggtgatggcagcagcatcttcctagaaaattgtttctaaaatattcttgttgtaatcttacatttgccacatgtttaggactttacaaagacttgtggtatgtattttctctttggttctcaacaatcctttgaggtgggtagcctccctttttcagcatgaattttgtgttgaaacaaggaccgttagtaaactaggtcatcaggccaattgttagaaaaataactttaaatttcatatttttgcttcagtatgttcatgatgtattaaatggtaactttaagcagaaaaagtatgatttttagagaacctgcaaataacacatatgaggaattatgttccctaatagcttagaatttaacatctctctgaattgaaatatttttgttttgtatattgtcctatgaaaagtaaaataaattacgaatgacagcaaaagtagtgtccacttttctcactcagaacatagcacagaattaatcccaatcagtgagtgtgaagttgggttaacacatacsaactatattcaggctagccctttatttttttttttaatactccagaaggtagaggatgagattaggaaaagtgggattcatggtttatgatactccctctctggaaatagtggcttttatcagagagaggtgtggcaggaaaatttatttatttcatccctgaaacttagtgcattacttcagccaagcactaagagtggaaaacattcagcctttgccaaaattgaaacaagagagccatttacataagattaaaaaaaataatttatatgtaagaataaaagaattttttcttcaatttgaatgtcgtacgctattgctaaattgctttaaacaatcaccttccatcagattttaaaagagtgacatcaaatgtgctgtttaaaattgttcttttataaatcacaaacttgagagaagtgtgatctttgtatcaagtacttcacattcataatagatcataagtactttgtgtgagatgcttttggcggaggagtcacacagaaatgtcagcattgaaatgttggctccctgcttgcctgtcctgggaacctcagggtcagactaggatcgggcgtaccctgcgactagcttggaaggctggggccatgaggatcattgccagatggaagagaaatcataagccagtaccgtgcatggaaagcgataatctctatcagtgcaccaaggggcctggaatgcttttgtcatgacccagtttatagtcattatttttctctgcctcatatctgtttcttcctcagctcatgctttggcaaaggtctcaaaagccattttcttttattaacaatgaaagcagtgattatgggtgctaattctgtgcctgtcaatgttattcagtttcatttttacaataacagtataaagcagacactttactgtctttgtaaactcagaggcatatgggaagttgccccaaggttgttcattcaggtaagtgatttgaacccaaggccgtctgtacccagaacctgcctataaccatctaatgagactgcctctcctaatactttaaatgtaatgaatagaacaaaaacagttcagagccttttctgtagtgatactttacactgtatgtttttacttcagtgtgatatatccacatgtattatctgatatttgcccctaaattggccagtggcaggggagatgttattatgttggtggataaggaaacaggcaccagaagtccacctggcttacctagagtcagctcattagtgatagacctgccacagtgactcctgtctctcaggtctcaacctggatccctgattcagccttgttgattatgggttctaggcctctgaatcaaagaaatgaagtaatgttgtaaacacaccattggtgggattaaaaaagcttactccatatagctttaagctaacatctgagcagacagctgtggagcacccctctttcaattctaactttgtccatggtttttgcctcagcctcttggttaaataggggttgatgattatttttccttttttctcagagatggtatgatttggtcctttaggttatttgcaacataaaactctgaaatatttcttcttttgagagttatggttgtaaatgtagttgtaacaaatagcctttactgcatttgaatctccctagagacgactatggccctgtttccacattggatctcctatctgctcagatgggctatggtgcaggaacttctctttcttattgaatacatttgtgtctgtctgtctcatgtcatccatatgcatttgcagaaatttttcaaaatgcttctccttttaaggtctagagcccttcaggattggaccgtacaccaactttgttaacattggagagcgctgtaatgttgcaggatcaaggaagtttgctaaactcatcatggcaggaaactatgaagtgagcatcttaataagacccctgaggcatctgcccatgtctttggctagacagcatgtaaatgaaacagctctctgcctttgatagtgttattagcagagctgctagaaagtgtgagaagatggtaatgtgtgtttgcagcagactgggctggtgggaggacgaggctttgaaaaattgaagctgctgttgtcaatatttgttaaaaagtactgcatttggtgtatgaagtaggatgagatgggagggatccaggttctagctatttctattaatcatgaaataagttaaaaaatttgagaggctttttattttgtcttctcacaaatccttctagggaaagggaaagacaagaaaattcctgtcagttccttatgatcgcatcaaacgctgactgttgagggtattatggatcttgttagctgtagactaaaataaacaaacaaaagaaataggcccttgccttggaaagtttatgtgatagttttagccatggtgtttttaagctcagtcactctgtggatgagcaaaatttaatacatacagagcatacctaagactcctggatagattttcctatgaaaatatgaatttaaaaatggaggaattttgcctgggccttaatgataattaactttatcatccaactttcctcacttttttgcaacctttaggagatcttccagaaaccagtaccagagctgatttagttttcataacaaggaaaggaccatttatyccccttcatggacctgttcattattacctgatggcatccctggaggcgtgtcttccttcccagtccctcagctgacacattagcagggcctggttgcccagtttcaccacttcctctgttggtcctcttcccctcattcttgctgctgtccagtgctcctgtatgcatccatcatgggccttcccagtttggaaattccacagggtgacttttttttgtgtatgggataaaactgaaattccttagtctgtcattccrtcctcttcacttagrtattaaactgccctcccatcctgatctgtcatctgaacattccaggaggctcgcttctgactctgtgcctttgttcttgtttgcttccttctgaagtgccagtgactcttcctagccatatagtgttcttcagttggcagtgtttctattatgttttgcttcttatgcctattctatggtgtccytttggtggatttgatagatttgacactgagagcattttaggaagaagcaaacaggtggaagtaataatatctatcatttaataaggtctttctatatgccagtcactgtgctaagcactttatgtcattactcatttaatcatcacagcctggtggagataggtactgtggttatccccattttacaggtgtagagatggaggcttggggaggttaaatgacttgcctattgttgtacagcaagtaaatgatagaacccaagtctcccaagcatgtgcccttaaccactctgctatctctgcctagtggaaacagtaggagggggcagtagaaacaggaagggacaggtgactcttcattagagtctagctcttatgacttaatgatccctttgtggtttagtggaaagaacattgacctgaaagaagttccagtcctatgttcttgcccaactcatacatctttaaacaaaccacttcatctctctgagcttgtttgggaaggttagactttgaagctgttattccgtgattcttaagaaataggtcagatattggcatttccgtttttgaggtcttttgaccctgttgcttactatcttatctcctgtctgtttgctccatccattccccattagtcagctgaagatgctccctctcagttagctttctccattttggtttgtagagacctttccctttcctggatgttgaggtcatcttggcatttgacccacacattgtatggcagtgcccagtagttttttacatgactgtgacatgtgcctccatctagatataaacccttcaagaaccaggattgtgatttacacttctttttattctttatattatttaaattagtattgatactagaaaacattttttgatttactgacttaattaattgatttatttattttgagatagagtcttgctctgtcacccaggctggagtgcgatggcatgatcttggctcactgcaacctccrtctcccaggttcaagtgattctcctgccccagcctccagagaagctgggactacgggctcatgccaccaggcccagctaatttttgtatttttagtagagatggagttttgccatgttggccaggctggtcttgaactcttgacctcaagtgatctgcctgtctcggcctcccaaagtgctgggattacaggcatgagccaccacacccggtccagatttactgaatttaagtgtgatcctttttctctatgtggccttggctcactacatgtggtgtttccttgtagcatatgccatagggtttcatgcctgttctatcacaatgagtgctaaaagtttctattttttttttccttgggctaaaaaaaaatcaagacaatatcagcatctactattgattttatccttgcttatttcattacactatgaagtgtacagtgaaaacttaaataaacaaaaagtctctgccttgttacttagaaggtattatggaacatgtatattttgcccagcattgttcagaatgagaagtatataagactttttggaacacttatcctacaaaatattccttagacgatcataagtgggaaatgctgtattctgttttgggaaggttgcagtgtgtaatagtgcattaaataatttgaaaagccttccagtgttataaaaacctgctgaaatttatttaagtcacatttcttttcatgtaacttctattaacagcctgcaatgaatactttcggcagatactgaagagttatatagtttttggcaaatactgaagagttatatcattttggatggtttctctaaggactttttttggaggagatggggcttgagctgggtcttaaacaatgtggaagggaaagggattgcgttccaagcagagggaacaacgtgatctgcagcacagaggtgggaacagatttggctgggtgaaggctccagtcggggtggaatgggaagttcagctgggtaagaagatggggccagctcagagggccttgactgccatgctgagggatttagaatctttatggtaggaaaacagctttggtggattctaagcagtgagatgatgtgatggaagagatgtgtaagaaaggttaatttgtgatgagtgatgggtggacagcaggcccggagtcagggagtctggcgaggtagtctgtgtaatttgaaggattgctgggaagggtaaggaattacctcattagccttttctcctagtaactgtctcctaatgctgcttcctctctcattcttccttcaggaagccttgtgtgttgccaaagtgcaggtggaaatgggagcccaggtgttggatgtcaacatggatgatggcatgctagatggtccaagtgcaatgaccagattttgcaacttaattgcttmcgagccagacatcgcaaaggttatacaaagtttatgtttatcagggggatttacttgtctcactttgacactcatttaaccgtgccagttgtcccattaatctgtgaactcaagaactggttttctgtttctcaacatcgaaaacagggtagtttctgattgtcagctttctcagatactgataacctttccagataaagcagatcttggagacagctgtggcttcagcctggctgtttccaaggcttctgggattgttcatgagaattgagtctcctcagatgtctggacagactaacaacccactttccatgtatgtgaaggaaaatcattggctctatttctaccataggcaagggaactcagtgaattctttcttataacaggaaggagagaacttttaggcttatcagattaagacaaaaatataaaacaagattaaatcaagagattatgtcagcttttacatttgttcttcaaaaggtgaaaattgattttcgtgtcagtcttttaaacatttttaaatgagttctaaaattaaaaaaaaaatcttaccttgtttttctgccgttaagtttgttatgagaagtgatttttttttttcccctcctgaggcagggttttgctctgtggcccaggctggagtgcagtggtgcaatcatagctcactgcaacctcaggcttctcycacttcggcttcctgagtagctgggaccacaggcacgcatcatttaaaaaaaatttttagtagagaggtcgggtcttgctgtgttcacaggctgattttgaactcctagtctcaatcaatcctcctgccttggcttcccaaagtggtaggattgcagttgtgagccattgtgcctggcaggaagtgatttttgaagttcttcttttttaaagaaacttcctagtgctctaagagttgcatttttcaggttgagctcttggtttttttattaggcttcagcagattcagcagatttaagttagagtctatggtaggtactgaattacatttgtccatctttcatttgtgtcttaaaactctttactaaaaagtcttgtcattcctctgggagtaaatattttgagaatttaaggtacaaagaagcaagacaacttgttcaaagttagttagaatcagaggtatagccaattgtttatcagcttagtattgggaagagggtagactcgccttgtaaggcccaatcaagtcaatggactattgaccctactttcctcatctctaaaatgggatcatcaaaccccctttgtgaattgtaaagatgcaagtgctttatcaactgtgaaggaccccatgtaactcaatacattattagtgttctgattgctacagtaatttcttatctttcttggttttgccctactaccacaacttattggaggccaaatttctacccaggtggtaaagcataaaatcattttaccagcaccttttcaccagtagggttgggacaccaaactatcagcaagcaaatacaagccgatacactggcctggtgttgtcattgcatttgaccctttccttagcaaacctctcattactagcatactaagaaaaagcaaaactggtagcgtgccttttcttttttgctcgtttggtggcgtggcttaggaaattgctgactactcattcttcagtcctcagttgaaatgtttcctgccctgggaagctttccctggattttcctgccccattctccatgcttcatagactgggtgcccctgaaatatgcttccatggcagtctgtgcttctcttatgcttttagcatttactacactttatgtcattacttgtttaattatttatctttataaactcagtggagccagagacctggctttcttactgttttccctgtatgggcctaatatggtagtcacttaattatttattgaatggcttaattgaataatgtggcctatgctgggagctgtggtatgcacctgtagttgcagctactcaggaggctgagtgtggagggtccctggagctcaggagttcaagaccagccaaggcaacatagttagaccctgtctttaaaaatataaaaataatgcagcctagatcwgttgcctcatttcatttctttgtatcaatctaattcttcaagcccttcctttcatctttcctggaacagaggtatgaattaaaaggaacctattctcaactgtgcatttcagttttgtcctttattttagttatatgcatttgttgataattagatctgcttttcctttctaatattaaaactctttttttgttttttttcagtaaagaacttgattttctaaagggaaggttgaatttgaataacttggctagagggctgtycccaaaggacacaaggctaaaccttaatccctgagtcagatcagggatgtctgaatcctagctgaggtgtttgcctyggggcttaggcgcttgaaagtgtactgcactgaagccagtgaactgatcacactgatttcattctgatgttcagctgtgatctttgagttgtaaatccctggcccatgcatggagtatcttgtaagactgaaattactccargtattttgggcttaaagaacaagtataktaaaattctatctctgacatactactattttttgtttattgttttgctaaagaagaaatagggaatactttggagcctttgaaaagtaatttatagtgacctgtggcctctgtgtgattttcttgcctttctgatctcaggtacctttgtgcatcgactcctccaattttgctgtgattgaagctgggttaaagtgctgccaagggaagtgcattgtcaatagcattagtctgaaggaaggagaggacgacttcttggagaaggccaggaagattaaaaagtatggagctgctatggtggtcatggcttttgatgaagaaggacaggtgagtggtttcttttggcctaatccrttgtgtttcccaggttagatagtggtgggagaaaatgcaagtctgaaacagctacatatatacatacacatatacatttatctctttccatatacattcatgtacatatatgtacacgtatctgtatacagtcatacatgatgtgttacttaacaatggagatatggtctgagaaatacatcattaggtgattttgtcattgtgccaacgtcatagagtgtatttacaccaacctagatgggatagcctactacacacataggctagatggtatatatagtgtgttgtttctatgttataagctaatatagcatgttaccgtactgaatactataggcaactataacacaatgatatgtatttgtgtatctaaacgtatcgaaacagaaaatttacagtaaaaatatggtattataaccttacggaaccattgttgtttatatgatccatcattgacttaagtgtccttatgtggtcaatgactgtatatgaaaatctgatatatagtaaagtctttgcattcatggagaaaggttgaagtattcaataaatgctgttgggatgactggctgtgcatttggaagaaaataaacttagattcccatttccaaccatatactaaaataaagttagctatttgcaacatgaataatagcagtgggtgaatattcctaatacgcaaagagtttatataagtcagaaagcaaaacaccccagtcaacccagtaggaaaatggacaaaggaaataacaatttatataaaaagaacaaatagccaataaacttatgagaagatactaagttttgtaaacattaaagaaataaaaagtaaagaaataatgagattagtttcctttatcaaatagaagaaaaaattagaagattgataaatggcagtcttcataatagctctgccatagaatcagggtggggcacatgggaagcttcaaatataatgatcgttcatctctgtgatacactgattattgtcatgttttatacttcacataactttgtatgaatattttggtacctatttaaaaccactaaaaaatctatttcttatgattaagcccttcctgggaatctagtaataaggttgagtgtataaggatatgtgttcacatttattgtagcattgtggtagcaaaaagctgagaacactaaatgtccattactagggcaatgcttaaacttggtccttactacatagaatactgtgcagcagttaaaaagaatcaggagatggaaccatgtcttcagtatattgaaaaatgaaaaaaatgagtgacatgatcccaacttaatataaaagtacttacatttacatatgtttgtctgcataagcagagaaaagaatttgatggttgtcaactgggtggggtagggatgatctgagatgggggtggtctcaaatggggacatactgacaatgaacaagtagtaggattgtatgtactttttctttctgtctttgttttgtatttttggaatgaaattgtttttaaatgcattttttgtatgaaagatacattttcttcattgtgaaaaaattcaaatcatccagaagactgcaaaagagagatagttttgatcattaacatatattgaaccttaattcacaccaagcaagtacacaacacacattaaatcagttcttcttccaagcatataaactgtgggtatgtattcttgttatttttgaatgtcttgtgaggaaactaaagcacagagatgtcccaggacttggcggttgtcacacagctaacagtttgcagtgctgggattcaggcctaggagatctggtttcattcatcagggcctgtgctaaatggtcgagtgaagaggctgtcagggaagagttggcctgttcagaacaggtggtcttataagacccctctgaggaggcaacatttgaaaaccagaataaaatgagagagsaagccacatggccacgtggagaaagagcaaacgaggtttcagcaaatgaaaagttttgtataaacgagattatacctggtattctgtaactcttttcccctgctcaacataatgttggcattttcccatmttagtggattaaaactccatgttttctggttgcattgcattccagtatgttttacttactattattgaatgaaattgtgtttctaattttttagtagcatgaacagttcagtggccaatgaatatcctaattcatgcagcgatttccccttctagaatgatttttttagagtcagttcattggagtgggattgctatgtcaaagagtgtacacatttactattttgaggcacgttgttaaaattgtccatctgaaaagttgttatcatccactacaagtttagtgtggtgtgggaccttttgataattgtattttctgcaaatagttagacaaatagttccgtaaacaaaaagaaaaaagccttcagccttctagatcctgaggcacccacgttcagctttttaagctgattcttgtagcatctacctctttatcttcaaattccagttttagtttttatttattgacttcctacagtgattaaagattttttagcttttcaccatccactgccctgactctgtacagctttacttttatccttcccaatatagttcattttagctataatcgttttcagtgcttacattattaaacagtgtaaaagctgagccatgcagtagtatactgtgattgcttatcctttctcactctttatttgttttctatgaaggtaatatttatctttttgtttgcattgttttctatgtatttcgccttcagattgtcccctagttgtataaatctcaagtatccaatgtagccagacacattaagaggactgtcatactacttttttgaagaattctccctccaagtcttctgacatgagctggaagtaggccagctgcacagctgtgactgctagctgtcccttaccttcctcctggggttccattgcctttctcttaggtttttagaactcataatttccaaattcttggttaatcttttttttttttttagtcatttggtagagtgcattctctgatagcttcttgtgaaagaaaacatggcagtaaatatttttgaaaccttacgtgtcagaaaatggccgtattctacttttacacttaattggcagttgcatgggcataggagtacaaacttgaagttgttctgtgttttgaaagtactgctccattgtcttctcattcccactggtattagtaagaagtccagtgctattctaactctttttttttttttttttgagacggagtctcgctgtcgcccaggctggagtgcggtggcgcgatcttggctcactgcaggctccgccccccggggttcacgccattctcctgcctcagcctcccgagtagctgggactacaggcacccgccaccttactcggctaattttttgtatttttagtagagacggggtttcaccgtgtcagccaggatggtctcgatctcctgacctcgtgatccgcccgcctcggcttcccaaagtgctgggattacaggcgtgagccaccgcgcccggctgtgctattctaactcttgattatttttgtgaaacttgtttttctattctctggaggctttgggaatcttttgtgttcaccgtgttctgaactcccgcgatgatgagccatccattatgctggcactcagtaggcctttcatttgtgaaactcacagctgcagtggtaggaagtgtccttgagttgttttcttttcttttttggtacatatattattgagatattgaatgttttggacaggttgcctaattttcttatatttctttcctgttttccaactctggtgttttgctctgcatcgggtgagattttcatatctacatttatcctccaaaccgtctattgagttttatttcttctttttcctgaaggtctttttttgttatctgaatgctccttttaaaaatatatatagcaactgttactttttaatgaagcaaatatcttcaaatatatcctgagcacttagtatgtgccaggccctatccctattctaatctctgaggagacaacggagaataaaacctagtccctgtccttgcacgatttatattcttagggacaaagggaataacaaatttaaaaaaaaaagatgtatatatatatatataattggccaggtgcagtggctcacacctgtaatcccaacactttgggaggctgaggcaggcagatcacctgagttcaggagttcgagagtagcctggccaacatggtgaaaccccgtctctactaaaaatacaaaaattagccagatgtggtaatgtatgcctgtaatcctagctactggggaggctgaggcatgagaattgcttgaacccaggagactgaggttgcagtgaggtgagattgcaccactgcactccagcctgagtgacagagtgagactctgtctccaaaaaaaaaaaaaaaaaagtgtgtgtgtatatacacacgttgaatggtgttgaatacggtaaagggaaaagaggatttgatcccccctcagcatggaggtgggggaatgttattttatgtaggatagtttgggaaggcctcatggatgatgtgacattttagcagaagcctaggtgagccatgtgaaaatgtaggggaagagtgttctttgcagagggaatcttgaggtagatagatgcttgtcctgtttgaaaaccaacagggaagccagagtagctggagcagaggggagaggaggagattgggaagatacaaggttggaaaggtggcagatcaaatcacatagggccttggaggccattcctaacacttttggttaacattgttactcagagtgagtggggacaccactgaaaacttttgaacagaggagcgaatatgatctgacttatgtttaaacctctctggttctttgtggagaatggtctgttagggccaaagcagaaatgttagagtttattgctgtarttcagatgagatatggtgatggttagggccatggtgaaagcaaaagaggatgttaaaastcatctgtttctacatatatttttaacatagagccaataggatttgtattcacattgggtataggttgtgaaagaaagaggagtcagggataactttagaatctgttggcttgggcaattgaaaggaaggagctactgaggtaagaaagactgagaagcaggtttgggatggggtaaggagaagtttgggtttggacttagtatgtggtgggtatgtcgagtgtgcagttgtgcaaatgagtggatttcatgggcaaagtctggcttgaagataggattcctttttttgggaattatttgtacatgctatttaaaatagtgagactggctgagctcaccaaaggaatgactgtagagaagtcctaggactaagtgagtcttagagccacagtgcttagggcactggggagaagaggaaacaccatcagaaggatatgagaaggagcagcctgtatggtaggaggggagtcagaagagagagttcccttggaagccaagtgaagaacaatcatcaaagaaaagggcatgttcagctgtttaaagagttgtrgatagatcaagtgggatgagaccaagagtttaccgttggatttagaaatggggtcatttgtgatcttgctgtactgtttccaaggagatgaaaactttattggagtgggttcaagagagaataggagaagaatagaagcagcagtataggcaactttttacagttctgccataaggggagcaaaaaaatagggtggaaaccaggggggaaatacgaggttcagaaagggcgtgtgtgtgtgtgtgtgtgtgtgtgtgtgtgtgtgtgtgtgtgtgtagatgctgtgacaacatgtttttgtaagctaatgagaatgatctgggagagagagggaggaactgatgcaggagataaaggatacatttgccagagccatgaccttgtgagttgagagagatggcagtcactgtgtgagtggaggggtggctttagatcagtagctggacagtttgctcaaagtacaaaagagaaggcagagtaaagagtgcagatctgcaggcatgctggttgatgtgctggcgggagtctataattgcttctgttttctcagtgaagttggaagcaaggtcaactcagagtgagaatggaatgttgtgccttagggatctgtggtgcttaactaggagtgcaaagcagactcactctgacagggaaggcagtcactgctggagcttttgaaaaatcgtacacactcctggacttcagcccttgagttttgactcatttggtctgggatgaggcctggctttagacattttaaagccttggaggtgattctcatgtatcttttggttgaaaaccaccagcagaggttatttcgtttagtcttcagagtgaccaccgaggtggyggccattgcattttacagtggaccagtgtcatatctaggacatggtggaaccaagtttttacctttggtcttcctcatttgaagactggtgtatgtttccacatcctgtgtttactctgtgctttgtttattggcactgcttagtgcttggtcttgtctaaggataggttttcccaatttagacttaactgtgaccacaaattaaaagcaaatgtaggaaaaaaaattaacttgctagttatgaaagatatacaaattagagcagcattaaggtaatgttttatccctactaaattagtaaagtraaaaatggtcaaggtctgtgtagatacagcagtgataaaactgaaggctcatttgttgcagagtgtagtataaactggtacagtcctattgaaagagaatataatgcctgtcaagagacaaaaaattgtttataccccttgagttcataatcttatttctgggaaattattccaacaaaagaattcaacagcataaggatactgtatatgccgagattttacaccaacattattgaaaatgtaacagcccaagtgcccaactgaagagaaatagataggtaacataattttactggactattctccagagtatttaaatattatgcagattatggagcagcatgtatgctcactgtcaaattgtcataaatattgaaaattataaaaagcaaagcaaaaatcctgtatactttcaaagttaagaagccagcaatacaggtatttttatataaaggcatgttttctgttgattgagttctcataatgctattggatgtagcaatcagttaagaaccgggatttgctttgcttggattgacaccactgattataggggaaaaaaacaactccctcaaatgggaaactactgttgcgactaagcaaggcacaccagctttgtttcaatatctggctgctgtgtttgagtgtttggttaatgtctgtgatccatgttgcaaacacaactgcaaggtcaagaccagatatgacaggaggctgggcctgagacttctggattgaaaggcaacaagaaaacatttctatgttttttgttgttgctaatagttttgaccaactgttattcttaactctacataacaagatacaggacacctttattattgaaatttctatgggacaagtatactgactctagatttagttctctttttctaaatgaaatgatttttaatttttttcatataatccttaggttcacaaaaatgactttgtatgacaatttttgataacgtgaagtgtcttagaaatataattatcacataatagcagaatagtctatattagtttttgtttgcacatgtgtaaactatataaaagaataatcaatatatgcaacacattttcctgtttttttcattttcttgttttaaaatgatttgaaaataaatttctaattatggagaaccattggatcttgattaatatctaattaatcytaacctggaaaataacaaggaattggtatcttgccagtgtttagatttgtcattgargaacatggcgtgtctttcaattactcattcaatggagttttgtaattatccctaaataggcaatctctagatcattcctgtgtgttttgtttgttgtttttattgtaattggcttattttttctttggtaaattttttccctttggtattgatttttagattttttcccttggaaacttccttttcttcagtgtttcccttcctacttgtcagtgtctctcttgaaaggcacaaacatccgtttccatcacttctgttttttttgtttttgtttttgtttttgtttttttgagatcaagtctcactctgtcgtgcaggctgaagtgcggtggcgtgatctcagctcactgcaacctccgcttcccgggttcaagcaattctcctgactcagcctcccaagtagctgggactacaggcctttgccaccacaactggctaatttttgtatttttagtagagatgggttttcaccatgttggccaggctgttctcgaactcctgacctcaggtgatccacctgcctcagcctcccaaagtgctgggattacagatgtgagccattgtactgggccgggccacttctttttttaattacagccccaggatgggcctctgcttcctccagggttctctcgcccatcttcaactacttcagttcgattttaaaactttaactcacctctgaagttagccctgttcgatctctgctccttgtcagactacattaaagaatctagatgtcttctacacattgtccttctcttcctcacagtgtctgccttgatgaccaaatcaaaaattgttttattgcattactscctgagtgtgtgatattttagcagaatctgagccatgagcttcttaagtaaagccttctactcactggtcacagtctagcttctctatggcttaagagtaaacctgtttgataaagctataaatggcatttattccttccttcttgctgcttagaatctcactgagtttttcttctactccaactgaagaaggtgccacatctcacctgttggtggttctcacctggctttatattagcatcactaaggggcttttacaaaacacttgctgagaccccatctccagattctgatttaactggttcagggtgaggtgttactattataaaaaacaagcaaacagaaatccctccagggtattgtaatgtgcaaccagagttgaaagcccttcctgatggagtaaagctgccattccgttgttttactgaacttctattctggatctctgaaatccaccagcacgattgaggctttattagtgtgtctgtcccacagccctggtgaggagtaagacagaagcttggtgaaccttacgtgatatgagatatgacctgctcctgacaaaggcctgtacaccaatgcygtgttcactctgagagtcattgtttaatcaagtgacagaggttgagtatctgttaatgtggcacagatactgtgctagacgccatgagaacaatttgacaagggcttcatccttatggaggttagagttgatgactctgttttggttctagaaatgaattcctgtcctgtgaggatgcacctgcttgtcccacaagcagggctgtctttggtatacagctgggccctacaccctactctcctgtgggtaacatactgttcacttcaacytgccctgcttggccagataatattcatggctcagatgaggaatgaccaggaccttgacttcttcatctaccaaccagactaggttactcagtaatactagtagcattggtcgcccctgtgccttctctcttagtgagcttagatgagccatgaacctagagcctagaactctattgggctgtctggtgaagggtagactttaaaagttcaagmctaaaggcagctgcaaatgggctgtttctgaccagttttttctgacayacatctcagtctcaaccttaaccttttcactctaactgaaggcagaggaagtaagcattgagaaaattccattaaggaagaygaaagctcgccaccttccctaaagcctgggtgcagtgaggccacagagaccacttcctgtctccctttccctgggccattttgtctgctaagtcctggaggcacttccctcccaagtagaggtgaagtctcaccccaccagctgcagagagcgattaaagagaccaaagaaaacagttgaaaaagaataccaaagtagtaagtgatcaaaaggctagatctaagagagagttcttttcataattcccctactcctcatttctgttgtctagggcctcactagatgcacttgacctatgtccgtgtccctaccccctcatctccacagaagtctgcaatatagattgcagtagggttggccatttttcaagaacatttttcgcgttcattgagaattgaccttcagaattgtgacttattttttcttatctctggagtgatagcaagtaatcattttttaagagtagatttgatttttcatacaaccagaaataattcaggatgtaatttggtgaataccctgtgttgaggttgtaaatttgatctgaagacagtttccatgacaaagttcagaaatactttgagtaaaagcascattcatacataatgttgagcacctactttgacaggcactgctcagggcactggggataaagcaagactggyattctatctaggggagaggagtttaccaattaacaagtaataaaacaacgaaaaatactaaagatgttgccaaaataatacaatttctggaaagaaatactccgaagaagaatggaggaggtggggaagggtggaagtggctggtttagagagggtgatttaaggtaggctctgaaaagggggcacttgggcagaagccttagttctgtgaagcacaaagccatgtcatggtatgttctggtagtggcagcaataaatgaaagttgctgagggaggaacaagcttgacgggtttcaraaacaccaaaggagcaatgtaggaggtgcggagtagaggagagggcaaatggtaggagatgagattggagatggaggctgagattctgaggcttttgggaagcagctgggggatgagccttgccggagttagtgttttgccttttagggacattattttgaaggtaaagactaatttgtatttatgacttaagacacatgttaggccagtgttaaaatgggtgaaggtgaggaataaatgcatatccttgaatatgcttagaatgtttttgcaagaagatctgagaaagcaatggcagtgtttcctgggtgataggttgtgacactgctgtcaggtcaagagaggaaggggcacttacatgttaatctcttctttagtagtatttgattttttatcatatgcatgtatttttagaagctttttcataatataccatatgtgtgtatatgtttaaggtttgattttttgcagaaagagtatagcygctgtgtttgtgaaaacacaaagagatctttaaaccagtctctcctctgagataatttgataagtgatcggaagctgcttggcatttagatttctgtgaaatccaagcattgacacttgagtgttttcagtgagtgaaatgtgctctaatgtataacacttaatattttaatattaahattttattaaaataaaataacaggtatttaatattaatattktaatagataatttttctatttcaaactacatcttttgctcttttccctaggcaacagaaacagacacaaaaatcagagtgtgcacccgggcctaccatctgcttgtgaaaaaactgggctttaatccaaatgacattatttttgaccctaatatcctaaccattgggactggaatggaggaacacaacttgtatgccattaattttatccatgcaacaaaagtcattaaagtaagtgtaggcatgttctctcccaagtcatggctcaaatttgtcccatgggtctaatgaatggttagaactaacttatatatttattggctgatgaaatgttaacattcttagttagtaaattgtttttctgaaatgtaggagaccttattttttttctttagtagagttttaacttgtgtaacaaacagactggagaacataacagagcctgatgaactcgcttgaacccaggagggtggaggttgcattgagctgggatcacgccartgcgctctagcctgggcgacagagtgaggccctgccttgaacaaaatgatgcaaaacaaaaaaaccacagaacctgataaataattaattatgaagcatataagagccttcacttaggtcccaaaatagagcatagctagcgcccccgtctgtctctccttttccagttacacctcattctcaattttataaagtagctattgtcctgagttttatgacgctactctgttgcttttcttcataaatttattgcttatatatgtagatttgatttgcatcatctatggattttatatttgcaaattcatgtacttactgaaatttatttgtgamcccaaaatcaatactcaacgtcacttctgcagttgttcagacttacccatatgcagagtggtggaaaatttgagtggcccaacccatattattcccaaagagggcaaacatggcagtgacctaccttcttatttcagctctcatcctgtacacagatgtcctttttgcagtctaatgccatgtttttcacacttttatgygttttgttrgtgaggtcactttttaaaatggccccatactagtgctgtctagtgttctaagcacaagaaggctgtgatgttccttagggaggaaatatgtgtgttagataagctttgttcagacatgaattatagtgccattggctgtgaattcagtcttaatgaatcaacagtaaatattagatacagcatcttaacatacatgcacaaaacaaggttatgtattgattggttgacaaaaatgtcatcagaggctcataggaacctagccctgtatttctcctaggagcaatgctctggtattccctaattcagtgtttgcagtgactttaaagaacataactaccacaaaatagtaagaattgactgaatatctgaatgatatagtttggttttgcctgcttttgagcctaataaaaatagaatcgtaatatttttatgtttttttcttactccatactaaagatttatctgtgtggctgtagctgtttgttcatttttattaatgtataatattctatggtataactataccacaattaactgttctattgttgatggacatctagtttttttccagcttttggacattatgaacaatgcagctctgagtattcttatatatgtatcttagacatgcatgcctgaacttctctgtagcatagacccagaagtggttggctcatagtagtagataatgacaaactgtctccctagattcttgagccaataatagtgaaagttcctgttattccacaagcctgatgatgcttgatactgtcatcggtatggttggaacttcaatttccttttgtccttttatagtcggtcaagttcatagtgaactagggagtctgttcatttaggctatggaagccttctagtaatttgtactttcagtgaataaggaattcctctttgtctttctgcktgtgtgtgtgtgtgtgtgtacgcgcgtgttctccttagggagattggagtctagtaggaaaaactacttaygaagcagcgcctttgtaatactgtaatacggcaagctttggtctatgtctagtaacaagaagctctgaattactttgaacttcggatgctttttgttttttttyctttccactcctatataaagcttaagagatgtgattgctgtttttggcaaaaaaggggaatcttttcatattttaaaatttttgccaggaaacattacctggagccagaataagtggaggtctttccaacttgtccttctccttcygaggaatggaagccattcgagaagcaatgcatggggttttcctttaccatgcaatcaaggtatggtagaagaactcttagccctgcggaaaccagtttttagttggggcaggggttttcaaagtgtggcatgcaggctaagtccggcctkctgccagtttctgtaaataagattttattgggatagagccacacctattcatttgtatcttgtctgtggctgcttttatgctgtaactacaaagttgagtagctgtgacagaggctrtggcctaaaatatttctctctggccctttacagagaaaagtttgctgatcgctgacttaaggtatcactgtaaattctcatttttatttgtattgcccttagtctggcatggacatggggatagtgaatgctggaaacctccctgtgtatgrtgatatccataaggaacttctgcagctctgtgaagatctcatctggaataaagaccctgaggccactgagaagctcttacgttatgcccaggtagagagacaagtgttctaatagatggatttttcctatctttgaatgtattactcacctacagttagtaraccttcatggtggaatagaagcaaatatcgaatcatatatttggatcactgaagatttctacagagagttgcagagatggtggtgtagctagggcaaggaagggtaaacagaccatgcctagggtgcttccgtattctgaacttaggtttctttaaatttattktaaaatgtaaaattaatttttcttgtaccaagtaacatattagttctagaaaatttacaaaattctggtaagcaaaggaagaaaataaaaatcacttgtaatcctaccacccaaagttaaacacttgagattttgttataacctttaagtgatgggagtttttatttctttttgcaaaatgaatatgcatgcataggtacatatacatacattttttacaaaaatagaactatactctagatgcttttatggtaatatttttttcttagcagtgtactgggaacmtatttccattttacttgatatttttctacctcattatttaaaatagctgttctggattttcttgtgtggctatgttagtgttacatggtccccactgttccatgttttggtttgtatacctgtttatgttaggatctggtccatctgtggcaaagttctgcagttcaaggcttaggtctgtgcacatttgatgtgtaaaaaatgagtataattatagctaattcaaacaccagcttgtttctcatttatatgttgggcgcagtcctaggcacatgaagtatctatcgtagatggttcttcttagaattcagtttaaggaaagttgagatctttacctcaaaagaacttgcattttaatctgtttaagagaatgatggcaaaggaagatatttttcccacaaagcatgttgagaaagtggtaggatgcttttgtgtctcttgccaactttgttaatgttttccatgttagaatctgaatttagctctgatagaactgccaactttgcctcttccacagaagagtaataaaatgctctggaagaaggataggacactrtgagattaaccacatccttgttttatcagccttactggtagtaagacttagatttctgaaattgcttatggaagccttaggctcaacaaagctgaaaggagttcagacactgtgccaacgctcacacgaccctcctctcagttccttaaaaacatttccagtttctcatgtggacccaggacagaatgtttcatttggttgtggcagatacaatcaagttctacttctcagcacattacttaagaaacattccatagatttttaatttttttcctattgaccacatagagtgcttagccctgtcgtcttctttgaacattgagacatgggcgttaaacactattcagttttgagtcatggtctatcttctacctagtagggggtccttcattaataactgtcaaagagttctgttgaaggccaaaggggcatcatagcctctattgccatgaagtcatactagacagttcttaattaacacatgaaatgctgtgtttttatcttttccctgatctatccagaggaggcagccctctcacttaggaaaggggctccttatttgtaagaccgttcccatttaaggtttttttggcattgtattttgtgctaggcattcttttggtctgtactcacttttagcgtttgtttactagctttcatttctgtatgtcatgctgagctgccaagaggttttgcccctggaggcactgtcaaagtgagggaaatcttcatagcaattgcaggagtttaacaattcatcatagaagaatttcctcattcttaatgtaaccacgagggcttcttataagccactgacctctctgtcagggagactgtctgccttcaaggtgacttccgttgccattgagggaattaataaccaaaacaggtatcctctaataactcttgggagtcgccagctctgtagcaattccttaggatgcgctgagtgaaatggagcatgaagagcaggaatattatgaggcaaataagagtcaagggattttttatcttttataagagaatgatctctttcggttattgcaaatgaagaagtctgcacccagattcctgtctgatatattattgaaactagtgggaagagtatagcctctgatcttccaaggctctctaatctcacatttggggaggaatgggatttttttgaaaaacaattttcctaatttagttcagactgacctgtggtaagtaaattatttttgataataaaaatttccagataccatgtaatttacatggaggatctttattaaatggtaccctaatggaggccaggcctcctatggagtggaaggattggtgctctggataggatggctgtggaatgacccgggagcttgagaatattcttgatactttctgggaaagttttctgttctttgatttggccttgatcccttccttcaccatttgagctcacattcttccttggctttctctgcagcagtttactccctttgataacctacacaaccgtgaggcccctgtgaggcagaagcaactctagagtgggaagaagtagtttttctcattagctttgtacacgtacagatacaaggagtagccagatggacatgacaattgcttggtcagtttgcttggtagctttctatgtaagcttccacagtgtgcctgggtctggtcttccttagtatgtgaaaactgtgtagcaccttgtttgtgtatcatggagaactccctattgaataactacatgaatagtgagatgggcctcagcatgccattgtgtatttctgaaataactgcttttaactgtactgtttcattttaagtattgctttcatgagtcaaattcatcaggtttggaacatagctatcaggtgggatagtttttagacatcacaacctccaacacttcagtgaattctttactgctgtttgtagcctcttttgcctctgtccataatcatatattttttgctcccttcccaccccataagtctggtacattgtggtatttttctgtgaacacaccagttccttttttcaagagtgtttggaacacaccgccctgtttttacacagcaaaactccatcccccaggtaggagttgtctgattgtgtggctaatagaacaaatggtatttacaggtatcaagtgatgggactgtgaacatcagagggactttttctttttttttactatctcgttcaggtttttcaacatatgagagtccttgtattattattccagttaccactttggccctaaatcttggagttctccccaattccttcctcctctccttcttstttcttctttcttctttctttttttctttcttctttcttcttgttcttcttctttctttttttttcttcttctattattattatttttatactttaagttctgggatacacatgcagaatgtgcaggtttgttacacaggtatacacatgctatggtggtttgctgcaccatcaccccatcatctatattaggtatttctcctaatgctatcccttccctagcttcccaaccccccgacaggccctggtatgtgatgttcccctccctgtgtccatgtgttctcattgttcaactcccacttatgagtgagaacatgcagtgtttcgttttctgttcctgtgttagtttgttgagtgtgatggtttccagcttcatccatgtccctgcaaaggacatgaactcatccttttttatggcttcatagtattccatggtgtatatgtgccacattttctttatccagtctatcattgatgggtatttgggttggtttcaagtctttgctactgtgaacagtgccgcaataaacatacgtgtatgtatctttatagtagaatgatttataatcctttgggtatatacccagtaatggggattactgggtcaaatggtatttctggttctagatccttgaggaatcgctgcactgccttccacaatggtagaactaatttacactcccatcagcagtgtaaaagcattcctatttctccacatcctctccagcatctgttgtttcctgactttttatcgccattctaactggcgtgatatggtatctcattgtgcttttgatttgcatttctccctcctctccttcttagttattgtctattaatacctttatatttgtcctttcctttcctcctgttaccactactgagtccaggcctccatcaaggactattaaaatattctccccattttgtgattcccttaaaaatgtgactttgaatgttaatctgcagctttagaactttgaataatgtctcccccttctgcccatgcaattgcctggaaggtcaaatttaaactccaccgcatgggtttttggccctctgtgtcttggcctctaccaccctggacaaacattactccagcaaaatcagtctttgtgtagcattaattcatccagctaatatttactaaaatgtcgctttgtgccattcatttgactgaacttagaggatctaactagtaagagagatgtacccctaccctctgagagcctacagctcagtgatacatgcagaaatgtatagaggtgattgtcacccagcgcagcaagtgctgtgagaggggaagtgcaggacgctaggagaagcctgagggagattctgaccccaaactagagatggtcagggaaagcttcccaggggaagtgataggtcaggtgagacttgagagaaataaaggaggtggccaggccaaggtttgggggtagagtgcagtgctggtggtccctgccaggggagagatatttgcatgtagccagagtctggcatggtcataggtactgcataaatgtatgtcagatgaacaaatgcgaaggcctggtggtaaagagttgatggggaggggagcataaggaacagaagtgttctggatggctgaagcttgtcgggaatggcagaagagaaagccagatcaggtgtactagtccattctcatgctgctgataaagacatacccgagactgggtaatttatgaagaaaaggaggtttaatggactcacggttccacgtggctggggaggtctcacaatcataatggaaggtgaaaagcacgtcttacatgacagcagataagagagggaacttgtgcagggaaacccctttataaaaccattagatcttgtgagacttactcactatcacaagaacagcacaggaaagacccgtctccatgattcagttacctcccactgggtccctcccacgacgtgtgggaattgtgggagctacaattcaagatgagatttgggtggggtcacagccaaaccatctcatcagggcattggatggcatggtaaggaatcagtaccatgtcgtgaaagcaataggaaacttacacagagatttttttcacagggagcagttggatcagatttgcattttggaagcatccttttggctacagtgtggaagatgaatcagagaccagaatgattctgggctgtggagactacttagttcttgggctgtgaaaatggaagcagggtggagagaaaaagttttgaggtgtaatcattaggatgaggtgattgattgaatttgagtagtgaatggagattcaaaggtgatacttaggtttccggtttggcagctggtacctccagttgaggtggagaaaacaataaagtaatgcartttatcaggtgtgccatgatcattgcgcttttgttcctttgctgaatctgccccttctcatcattcagcttctttgaaacttttctttgccaccttagcttacgataaccattccttcctcaaaattcctatgtacttagtctgtattatgtactcattcagcccttgacatatactccctttctttctttacatattttctacctctcttatgacatggctgtcttactctgttttctttggctctaacggaataccaaagactggataatttataaagaagtttattkagctcacaattctggcagctggaaartccaagagtatggccttggcccctggtgagggccttcttgctgtgtcataacatggcagagggcatctcatgtcaagagggcaagagcaagagagccagagagatagcaaacctgcttccatggtagcaacattaatccagccgtcataaattcgttaatccattcatgggggcagagggattaggtttccaacacaacttttggaggacaccttcaaaccataacaatggcagagtccttgagagcatagtctgtgtcgtacacctcctagtgtgcccacctttgatgtctgacttagcttcattatggcctccctgcatctgtttttgggtactggtgatccttgttgagagctttgaaggctcattgggtttggagtatagcttctcttactgtcctggaaattttgtgttgagttgttayttttagaaaagagggaaaggaaagaatggaattttactctgtctctacactaacagttcaaaccctaaaagatttctcatttttccctctccttccctcaaacattcattgagatcttattttatgctggacagtctactaggggctggaaaagtaaaagaagaataagacacaggtttttttgtttgtttgtttgttttgccatcaaacagtttggttagtgatgagttgtatccatttcttggtttcaatttcaattcagactcaaggcacaggagggaagaaagtcattcagactgatgagtggagaaatggccctgtcgaagaacgccttgagtatgcccttgtgaaggtaagttacaggggcctgaactggagggctggaggctcatcatggctgactgatcctgttgtgggcggtgtgacagtagctggagaaggagatgcctagaccactgattctcaacctggggaggtccctcttgctgtcccccagctgcccccccccccccccccccccaccatagcacatttgacagtgttcagagacatttttgattgtcgtaactgtgcctgggaggtattactggcatcctatggccaggggtgctgctaaacatcctgcagtgcccaggacagccccaaaccacaaagaatattccttcccaagtgttagtagcgccgaggctgcgaatcctgtcctggaccaagttgctggtcagttggtcagcaagtcagtttcatagttggaattttaggctttaagcaagatcagtaatctcttggcttcagtttcctcatgtgtgagtctggagaatctcagagttttgttttgttttgtttttttttggctctggagtttaacatttaactctttcaccttttgagattcacatatttcagtttgtggagctagttggccaatccaaggatcattgaactggggaccttggaggagtggggcttgtcattgaagggcggataagtcaatggaggcttcatggatttgaacttcatttaagggcctcatccagtgtcatttctccccagccctacagcattacagtgagaaaacttactgatttctccacaggcatttattaatgtataatctggtaaaacacgaagatacaaaatggattttatgcatttgaacttattagtccttctctgttagcacattttactgaggtatattttaaagcattttttaattggcatataaaattgtrtgtatttactgsatacaacattctgttttggaagtgtatgaggtatttactttgtttgtatcaataaagccagctaagcactttatctcaatcctcaaaataaacatatgagatactattgtaatattctaattgaggaaactgaggcttattgaattgcctaaattagtgataggaagccagattgagtccatgcactctgcttctggaacctgtgctgttaggcattttcatgatggctctgtggaggtaaggcagttttttaggtgattttttttttctttctttctttttcttttttttttttttttgtcttttttagggcattgaaaaacatattattgaggatactgaggaagccaggttaaaccaaaaaaaatatccccgacctctcaatataattgaaggacccctgatgaatggaatgaaaattgttggtgatctttttggagctggaaaaatgtttctacctcaggttagcaaaatatggggagaaattttcacagttgcatcttttctttgtcatttaataaatggygatttgggatatatttctcaggttttaatttggacaagagttcaatggtattggctagtcattccttctctaaatatgtttaggagtcatgtctgcaagaatccgtcttcagastggtgtggatgttggaaatccgaaaattcttagcatcataatctatcataatccttatgttctaatttttgtatcacctcttacccccagtgcctatctctcccctccaaaagtaaagtaaaacccaagataaatgtagagttactaacattaagacttgatttgaccaggcactgttcatctgtaaggatgcatattttgagacaaatgttactgttttaaatgacggtacattaagtggtttgtttaaagtaaaaccagaactcttactttgatttacagcagctgctaaccacatcagttaacacatacttgttgagcatgtaggttagtggctgtgcggcatttgagaaactaaaaggccttcatcttgccttaatgtaagactggattttaagtgagttttaaagctggggattgagaagagaaggctgggaatgagctcatggtggagaagctttggtcctgaaggatacatagaactcttggataaaagatagagggcctcctagacagaggaaaaaaaaacaagccaaagttcagaagacagaaattgcaacatttgatttccagccttgttttccttctgctgtaccttrttattcactggctttccctctggggagcttatcctttgttctgcctactgtcaaaagactccagtgtagctgtcctgaagtcaaagcatgcattcctaatgtgtgcccaaatttcacaagtggccatcagcagttgttcctgtggtttgggaaagatacctgatctatgctttttttctcaggttataaagtcagcccgggttatgaagaaggctgttggccaccttatccctttcatggaaaaagaaagagaagaaaccagagtgcttaacggcacagtagaagaagaggcaagtcattttgttcaggcctatgggcctttagtgggttgacctggaagacttgaggtggtggtaggggcctaagcagtcagggttggctgtgttcgttattgaggataaaatagagaaatgatcccacatctctcccttttttaaccgagtatcagaatactctgggactttcttttgaatgtagctttataacatttttaatatagatacaatttttcaatcaaaacccatgttttcaagacaaagccagttcattcatttgtgccttcattacctgatcatttacgaagstgctgtgatgtgccaagtactgtgccaggcactgctcactcaaaggtctgtccccgcccttgaggtcattgagtcatgcttgtttttagaaaactcttaactgaatagtctttctgctggtgatgtccttggcaccacttctggattcaatttaattcttgttggctgcaccaccagagtaaatcattaagctttttgaccttgtttagctccctgtgaagctcagacagctttggcccctaggattctgaatttttaaattgatctgtttgtgaatggctcagacaaacacagagtttataaaaatccttcttgttttgctttttttctttttttggggcagtagtgggggatgctaactgtgcatagaacaacagtgctgaggaaagatactcacgtgccctctgtctgggctgttgtggtttttcagattcagatgggacatacacatacagttaacctgttccttcccctctcccctgcctctcccttaatggctaaccgtaaacatttgtcaaataagttcccccgcacccagagttaaggatgtggtcttcagctgtggtgctgttttgtgtgtgaacatcaactattctttgaaaggatgggacctcctgatcttggctgaagccccttgggctagcccattaggtgggcctcctttgaactgtttgggcttcggtttccaggtctgtctttgaggtgctcttggttgtattgaattgctttctgtgctggcccctgcctggctctggagarctaggtgttccaccctaaacaaccctgccttgctgagctgcttggcttcctttccaggacccttaccagggcaccatcgtgctggccactgttaaaggcgacgtgcacgacataggcaagaacatagttggagtagtccttggctgcaataatttccggtaagttaggacctcacctctttcaaccccttttccatttaaaaatgaaagccttttaacagaataattcttcaatgggtgggaagagtagggcatggcagtggatgttagaggttattttttatttctttttgcttgctgtgtttttgaattttctacgtgaacacagcatttcaaatgaaataagttagtaattatmcrtgttcaaaaaggacataaagaatagtaaaagctattcaagtggggtggaaaccgtccagaggattcctggggttggatgttgggacagaggtgctaatagccggaatatcaggctccttcccatggccagtggtgttcatcatatcctctttttcctttcaataaactyagattttagaaccgagatcttatgagaccttggctaaacagttttacaggaaggccttctctgtacaagtctcagttggctttgcttagagccaggaccctgtgttcttggtgattaagctagattttggaatgttgtatacaagtaaaacccctttctatcttattataattaataaatattcataacaaaatcatttgcatgtgagagctgatgacctgtagtaagwatrtgtttcgcttagatttgaacatattctttgtaatgaaaagcctgatggaaataatgctttcccatatccatgtccagccaacagtccttttgagtcatagacttctttccaatgtgccattttctctagatagagaagaaaattgactggagctayccctgtactcctcagttctcttctttgctgtcaagtaacaattacctgctaagctstgtccctgctgtcaacatttttatccatctctgccttcaaggctcattaaatgcggctaagaacctttcaggaaggctggagacagagaagcagtgtcaggaaggcatttttttttccctctgactgtcttcacaagcatttctatttacctgctcacttactgtctaaagacttagcgttctctcctagtcctagaaacgaggaatactatttctatccatgtacttactattttttaaagagataaatttattgaagatagatagttgtaatgaaattttacctatataataaatatttggataaggtgttcgcttcctaaagtctacaaagcatttctgctataggcttacctttgcaaacctgaggttgttggttcctgtttgcattcatcacagtcagttaaaattcacttsagttaatgttyatagatcatcttctacttaccaggcattatactagagacaccaaaatgatttagttgacttttctccttgaaaaagtttactgtttctcaggctaaatagccaggtacatgttcagccttaatgggacaagaaccattgaagaaagtgacttgtaggtaaacttcctaaaagtgattcttgaggtatcattgtcatgtgctttatcatcatttattttgatcagtggattcttagctgagagtattatactagcaatgtttatttctccagtaaagacattttaagaagccagggaacattgtggcatttctccagggtgctactggaactgaatgtcagcagttgtgaagactgcgtattaagcctgaggctttcctgcaacaaacccagttgctatgtgttgggcactgarggtttgcgtatctttgctaataagtctaactggagaaacactttctgatgaaackttactttcattttacaaaaacaagtgaatgtgcaaacttcatgtcaaacactcctttggcttgtgtgtgataacacatagactcttccattggtgagtttaattttatggtgtcagctagtagacargtgtccctggagattgtcttatggaataatgtgtacttttactgtcagtaccaggctagtatgcttgaaggaattacctagcctagtgagtgagtctagcaacctatcctgtatctaatccttttctttcctggctttttatcattgttgcagtgaatctcaaaaatgataacaatgttttttctttgtggggataaaagaaataaagagggctaaaactgacagttctgtttagagagaaaatgtattttttaaatggggaagatatgatgcaatagaattgcaaatttgaggatttgaatagaactaaggatgtattcaccaagaatctagtattacctaccatttgtttaccacttcccaatttatacagttctttagtatcactgatttttttttctttgtcacctttttgttgttgtcattttggttcctttcctttcttttctttcatccttccttttcatggttttgatcctactaccctgcctgttattgtatttctccttttatagatgagaaaacttaggcttagagaacttgagagatttcatcatagtcacatggctagcaagtgtcatgggcaagcacattcagggcttttggttctaaaagctgggacttcgtaatatgtcaccttactttacaatattttttttgacttgagttgtaaacaagtataatgtctaatattgacacaggcataccttgttttattgtacctcactttattgagctttgcagatacagcattttgtaaaaatttgagttttgtggcaatcctgcatagaacatgtgtcttgatggcatttttccaatagcatgtgctcatttcacgtctctgtgtcacattttcctaattctcacaatatttcaaaccttattattrtatctgttatgatgatctgtgatcagtgatcagtgttactattttaattgttttggggtaccatgaaccacacccatagaagatggcaaacttaatccataaatatatatattttgactgttccactaaccagccattccccatctctctccctttcctcgggcctccatagtccctgagacacaacaatattgaaattaggccagttaataactctgtaatggccttgtaatcctctaagtgtttaagtgaaaagaagagtcacacacctcgacattaagtcaaaagttagacatgattaagtttagtgaggaaggcatgtcaaaaactgaaataggctgaaaactaggcttcttgcaccaaatagcacagtttatgcaaaagaaaagttcttaaaggaaatctaaaatgctcctccagtgaatacacaaaggataggaaagcaaaacagccccactgctgttatgargaaagtttgagtggtctggatagaagattaaaccagccacaatattcccttaagccagagtctcacccagagcagtttggcattgctggagcaataacaaattgaagagagctccaaccgtcttcaattttgtgaaggctgagagaggtgaagaagctgcagaagaaaagtttgaagctaacagaggttggttcatgaggtttaaggaaagaagctgtctcctaacataatggtacaaggtgaagtgcaggtgctgatggagaagctgcagcaagttttccagatctagctgacatcactgaggaaggtggctatgctaaccaataggttttcaatgtagatgaaatagctttctgttggaagtaggtgccatscaggactttcatagctagaggggagaagtgaatgcctggcttcaaaacttgaaaggacaggctgactctcttktggaggggctgatgactgtcagttgaagccagtgcgcatttgccattctgaaaattctagggctttaagaattatgttaaatctactctgtctgtgctctataaatggaatgacaaagcctggatgagagcacatctgtttacagcatgggtttactgaatattttaagcctaccrttaagacctactgctcagtaaaaaagattcctttcaaaatattactcctcattgacagtgcacctggtcacaagaattctgatagagatatacaaggagatgaatattgttttcaygcctgctaacacaacatccattctgcagcctgtgaatcaaggaggaattttgactttcaagtcttacattttgtaaggctgtagctgccatagatagtgatggatctgggcaaaggaaatcaaaaaaccttctgtaaaggattcaccattctagatgccattaagaacatttgtaattcatgggaggaggtcaaaatatcaacattaacaggagcttggaagaagttgattccaactctcatagatgactttgagggattcaagacttcagtggaggaagtaactgccgatgtggtagaaatagcaagagtaaaccagaattaaaagtggagcctgaagatgggaatgaattgctacaatctcgtaayacaacttcaacagatgaggaattgcttcttacggctgagcaaggctgagcaaagaaagtagtttcttgagatggctatgaacagtgttgaaataacaacagaggatttagaataaacagcacgtaaacttaggtgataaagcaggggcaaggtttgagatgattggcctacaattttgaaagaagttctgtgagtaaaacgctatcaaacagcatcacatgctgcagagaaatcttttgtgaaagttagattcaattggtgtgggaaacttcactgtcgtcttattttgagaaattgccacggccaccccaaacttctgcagccaccactctaatcagtcagcagccatgaacatcaagtcaagaccctctaccagcaaaaaggttacaactcactgaagacccagatgatcattagcattttttttttagcaayaagtatttttaaattaaggtatgtataccttgttcttttagacataatactattgcacacataatagagtacagtatagtgtgaacataacttttatatgcattgagaaaccaaaaaattcacatgactcactttattgagatactttattgtaatggtctagagttgaacctatagcatctctgagttatgtctgtattctaaattcccctcaagaaataatgtagaatatttggaaatatttttgattaattccattgaggttaattttacatatactctgtaatagtaactaggaaaagacaaaagaggacattttccattacagataatgcacagtgtttaattatgtaagaaaaatacgctatttcatgatacattttaaagttatacatcatacatctaatgtttttaaacatgggtctgataaccagtggttcttaatataactgtctagtatacgtaaaagagcagtatatggctgagcatgaaaataattccaaactgtataatgttggaacgttcagctgagtgaggaacatgattgtacctaagtcaaagatacggtaatgcagtctytcctgagaacttcacatgctgataattatttagaggatttggatccattttttgaaggagagatcaacaatttgtttattttttttaaaaagtaatggaaatggcaacagaccccactggcactacttaagtacaggttggaaaccatggctggactgcagactggatggaaacacatgccatcttgtggtggcatgtgtgaattgcaggagcagcagacaggctgccaccttagttaactgagaaataaagggtaaaatgacagcaagtatcaggtaccttaaaaggatgcagatgcagttttattttcctttttaaatttcttctggagacgaaaaggactttttgtcttacattacagtatttttgaaattctgtgtattcttaaatagtatgagatgcctttgctaaaacattcagtgcaactttttttttcctggattagtatccaaattaaatgcttgctctcatagctctattctaagcacttaaaaaaagagtttttttgtagagacaaagtctcgctaatgttgcccaggctggactcaaacccctggcctcaagtgatcctcctgccttggcctcttaaagcactgggtttacaggcatgagcctccatacccaacctctcttctgagcactttaaaacaaatactgtaaaatcaacaacttccgtaacattcatttttattctctttagcctcccatgtggcgaaatacaggaatgtgtatagggagaggcttacagacatagrgtatggctcaaaatgacaaagggaaactgagggagagtcaaggaagatggggttatgtgtaggggtaaaacaggaggttgtggtagaggtgagagggatggtgggaagaatggtagcaggcacagagggcaggctggatctgacctgtgccctcttctccgacttcacataccctgggattcctagctagttcaggactctgggccctcatagtgctggtctctgcctagacttccctgtttccttcagctaatacccacttaatttttcaaaatccatttcagactttcccctaggatgcttctggttgtcacccattttgggccttccatacatagtacactgtaaatgctttcattgtagtacttgccacaccatattctaattcagagcttgccaacagtttctcaactcagatgtgccaggaaacccattctctttcctgctggagagtggaactgggcctctgtcctacatgggttgaccagggctgtgagcaacttcctttgtgcatcccagtaccataagtgtcatttcagtgtgtggaaatagtgagaattgccctctaatcaatagtacatttgactatttccccagcaagacgactttgaaggcaggctaattagctggaaattgaacttgtcacccaggcctctggctcagtgttcttggtcgttttcttacctcactgatctgtggttatgattctctcctgctgatctctccttctgggagtggtctttaaacacagaaatgttctggggctcagcccttggacctcttctctgtcttcactgtctagatgtgtgtttctcaaactgtaatgtaccttcttgtcacctggggattttgttaaaagtcagattctgattagggtaagtctggactggaggttctgcatttccgacaaactctcagatagggctggtgctgctggtacaggagcacacctggagtaacaaggcctggggtgggctgaagtcgtctcattcgttttgtgacttcagtatcatctgatgtactgacaagtcccaaattgtatctccactgtggatctctcccccagactttagacttacatatccagtggactccctgacagctccatttggatatctaaagaaatctcaaatttaatattttgaaaactgaactaattgccaccattttgtgaacacctccccagctctcccctatttcaagaaatagcaacttcatttttcttgctgctcaaaccgaaactcttgcgtcatcctctcgtcagataacccgcatgtaacccatcagttctcctttcacagtatttccaggatctgaccacttctcactacctacactgcttcttgtctggatttttgcagcagcctaaccagtctctctgcttctctaccccggacttgtttcagtcccaagtaaatctgttaaatctaagtcagatttcttactccactgttcagaccctccagtgatttctctcttcgctcagtaaaactcagagcccttgtagtggtctgcaaggcccttgtgtagtgggtataatctggaagcttcccggaccccacccctggtcagttaaatcacagtctctggaaaatggagtccaagcttcaggttgtttgattttgaaaaggctcccctggtgattctgatgcgaagtctacacaggctctggccttttcctcctcctctgaacttatcacccacaactctatccttctccgtttctgttccagccacaacaatttccttactcttccttaaacatggcaagcatccacataagatgttcctgagagaaacactgctgaaacaagaaaaagcagtgacagcaagatgattcttgccatcatactgatgcgttttagttgaattttaaaacatatacaatgttaaaaaaaaaatcagctttgaaatgtatgcctttttgtcttgatttaaaagcagtatgctatttttcctagttttatatgtgacagtctatgcttagtcattgtttaacaaaagatccaggtactagactttcttcaatatgttaaaaagaaaaaaaaagcatgtggtaccatctcactcctgctataacctgcagtggttatacatcattaacacctccagcgtgcatttgctactgggttagtgccaacaaagctgaatatacttaccattgatttgaagttgtcttactttttactgaagattccatatgtcatagttttttttttaactttttttaaaaaagtaatatgagtacaagctaaaaatccagtggtatgaaagggcatatagtgagaagccagtccccttcctgccccagcgktcagcacccattgttaccagccagtatgtcatgttgtagtcttaagcattcttttttgttcttgttatttaaacgtttttgcctatttaattttaagaattgttgatgtaatgaaataagtaaaaatgcatgctgtaagtttttcaacatcttttaacaaatagaagaaggttaaattatcaaaatgacattaaggtactctgtaaatttaaaatagaagtaattcctagaacattttccagggcagacattcctgtttcctctgagttccaggaagctctctcctccatgaattgaaatttgtctggcactgttccgttctctgagagtgtgctccaggcttcctctgccccagcgcctgttctcctgtgtgcccatctagagtctgcctttcctttcagtcttgccctcttgccctcggtgacctgcaccctgaatcactctccctctttttcttgcgttaagtaatcagagttccctgacagctcttcgtgtgcaggacctgacctctttttcatgatcttccctgttggcttccaagttcaacaggtgtttattgaggaacttccctagccctttttattggcctaaatagataagataatggattttggagtgagatactgattcagatcccaactctgcctctaattagttgtgtgactagacagattgcttaatttctctgggccccttctcattaaaatgagacccatagtagtgctttcatgatagagttactatgagggtttaaatgagatcatttatgcaggccgggcactgtggctcaagcctataatcctagctcaagcctrtaatcccaaaggaagccgaggtgggaggatcacttgagcccaggagtttgagaccagtctgggcaacatagggaaaccctatctacaaaaactgtaaaaattagctgggtttagtggggcatgcctgtggtcccagctactctggaggctgaggcaggaggtcaaggctgcagtgagccgtaatcacgccactgcactccagcctgggygacagaatgagaccctgtctcaaaaacaacagcaaaagagattgcttatgcaaaaagctgagcacagtgtctttcaacagatgaatggataagcaaaacatgttatctccatacagtggaatattttttggccttaaaaaagactgaacttctgacatgcctcaaaacatggttggactttgaaggcactgtgctaagtgaagttyagccaaacacaaaaggatgaatactgtattattctacttatgcgaaatatctagataaggcaaattcatagagaaagaaagtagagtagaggttaccaggggatggagtggagagggtgggagagaagaaggggtagttattgctaaatggttacagtgtttctgctctgggtgataaaataagtttggacgtaaatagtgatgatggttgctcaacattgtaactgaaattcatgctactggattatacattgaaaaatggttaaaatggaaaagtatatattatgtatatttcaccacaattaaaaaaataacataccagaaaccattgaattgcacacttgaaatgggtgaattgtatggtatgtgaatgatggtcggtaaagctgcttaaaagcaagcttagcatagtgcctggcgtatatgtagtaagtactgaataaatggtagttgtggtggtaatcctcaatatttagtgagcatttcaacttgattctcgtttacattagagcagtatttaatggttgaaataaaaatgttcatttcagttttgtctctaatgggctttcattaattttctcatgtctcatttctgtgcctcagagttattgatttaggagtcatgactccatgtgataagatactgaaagctgctcttgaccacaaagcaggtactgtgcaactatactttgggcatttctctaaatgtcatatccccaggtgtctgtcatttccctagttgtctgtcagtgaatagtgatgccccatgagggttctgtgggacatamaatcaagtgccagctcctgcaccaggttgctttcattgccatttctaatggggttgagagaygagaatgagtaactatggaaccgagtcctggagatggggaatggggacagacttcttagaacagttgtatgtagtcatttttatatttcttctcacactgtgatatattcaagtccgggaaatcatgagctaaatatacctttattgcatcgtttcctaaaactatggcaagtaattattgcaactttaagttataaatcttatttactaccaaaagcaaacaatagattgaaattccccagtcggaaaagatgtcttagaattagaaactggggatgggcgcagtggctcacacctgtaatcccggcattttgggaggctgaggcaggcggatcatttgaggtcagaagtttgagaccagcctggccaacgtggtgaaaccctgtctctactaaaaatacaaaaattagccaagcttggtggtgggcacctgtaatcgcagctactcaggaggggcaggagaatcgcttgaacccaggaggcaaaggttgcagtgagccgagatcgcgccactgcactccaacctgggcaacmgaatgagactccatctcaaaaaaaaaaaaaaagaattaggaattgggaattcatgttaggtcttttggtcttcattacaaagttttttaaatggatcttcatccttttcctttttctttcatcttcctcactgtcctttttgtcctttttttttwaaaaaaaaaaaaaatagatataattggcctgtcaggactcatcactccttccctggatgaaatgatttttgttgccaaggaaatggagagattagctataaggattccattgttgattggaggagcaaccacttcaaagtaagttatactaangagctttgtcctcacttcaaattttcttatatgccagtgtttgaaacagtgggaaacctgtgttgttttggattttcccttatgtttagtacattgactttttgttatataaacacaaacattttctggtgttcacttgggtgagagccagaatactttcagagcatgctatagaaaactttttgtgattcctattctttgctttttcttggatttctttggcttgcaataatctttttcttaacactctcacttgcgattcagttcctgagaattataatgaactcttctcgtgaaattaaaccgagtggagaagctgtgttttttggcacaaaatcattacttgaacttttgcccactctgtcttgaagcaggtgtctgactgaatgattacaggttcctttgaaggaactctaaccttgtagtagtttggagacagaaagcccatctagcaagaatgaactaaatggtcactttggggagttcctgaaaggggagctttgtgggaacctttgggttaacaacataaagaggtataaaatgtaaagatgagaaagttcaaatttgttcacatgataattattcagtttaccagatttttcctgggatcatgatcatagtgatatgtggtaagtgctacgttaactgtgggtactagactttttatgccatgtacagttcactttctcagcattatcatactggaacattgaacacagtggtcccatagcatctagtttatttttctgatgcagaaatacaataaaggtctggttataggtatgccagaaatacaataaagatctgggtataggtatacaataaaggtctggttccataggtatgccacaataaaggtctggttataggtatgcaaaagaaaagtgttccttttgcactacaaacaactgtacttttagccaatttgtatagggttgttcagaggaacagaatcaataggatatgtttatatatagagagaaagagatttattttaaataattaactcctgtgattgtggaggctggcaagactgaaatctgcaggctggagacacaggtaagttgattttttgagtctaaaggcagtctagaggtggaatttcttcttccttgtagggctggggagtgaataagggactccttgtcttgtctcttaaaggtcttcagctgactggatgaggcccaccaacatagtggaggataatgtgctttacttaggtctactgataaatgttaatcacatcaaaaaaaatactttcacagtaacatttaggttgtggttaaccaaaaagtakataccatggcctagccaagtttatacgtgaaattaaccatcataccatttaaaatttgaatgagtcatcttcataagtagaaacagtattatgtgtcttttatccattagctgttcttcatacttgaaggattcgatagtttgactatcgttgcttaacgttagaaaacagggtttgcgtttccacaaaggacttatgtaccaggaaatgtggcagacttggtctcaagggatatggccacccattaataatgggttttgatgagcatgggcttgggtaattgatgacaggcttagtgaagagaatggtaagaggacctatggactgttgtcagaatgaaagactttaatatcaactgtgaagtagaataaataaatatttaaaggaacataattaaaatacattatgtgttatgtaaatatgatgctggcttcaaaaaaagaatctttttatatggtgggacactacactcagaaatttgcttcttgtgcaaattggaactttaccaaatagtccattctatcatttactatgtaaaagctaccagattaaagaaaaaaaaacattgagaagcaacgtgactagcctctcaagatacattattggcaaaattagcttgctaatgattcttagcagttgcaacctgatatatcagattagaattaacaagataggaaatcaccaacatctcttcagttactgcgaaatatctattctcattgtctgggaaactgtaaatgtgtttggcctgaaggtagaaagctgagtccactgaccacctaaggtttctttcaactctccagagcattgtttctgtatgagccctgcctcttctggttctcttctcttccatgcctgttgcagtttctgggaaattacttggaaaataagagctagtaggtagcactgcttcccgggaaccattcccttctacactgtggtgctggaacagcctttggaaaacagatttccacgcaacctccaagcacttcactgtagaatttcccagttctgactccattctaattagtgacagtggatgaggtctgcgatctgaggtcttgctttagcaagctctcttatttaagtaagtgcttttacagaagtttagcagttatacagaaaagtacacaaatcatatagatgtacaacttgacaagtttttacaaaagggaacccacccatgtaaccacctccagatcaagaaatagaacactaatggcaccctaggaacctcagcaggttcctccacccagtcatcctttccaacaaaagtaaccactgttctttcttgtcaccatacgttggttttgcttgcatttcaactttatataagtggagtcatattgtatgtgctctcctgtgtccggcttcttttgccccacatcagccttgttacratagttgtttggttttttgttggttttttttcaatgtagtattccattgtataaygtgctgtgacttatttactcttgctactgttggtggacatttgaggttttccactttggggctatcacaaacaatgctgctatgaacacttatgcttatgaattttggtgcacatgtatgtgtatttttgcctagaagcagaattgccagatcataggatatgcctatgatcatcttcattagctattgccacatagttttccaaattgtagcaatttacactcccacaagcaattgtgaaagttccagttattccacgttcttttcaatggtatcccttgtcatgggtgtagtaataccttgctatggttttcgtttgcatttctctgctgagtaatgatgttgaacaccttttcatttatatattgaccatttggatatgctttttaartatttttaaaaattgggtattctgctttattcttattggtttgtacacattctttagtttatagtagttacaagtcctttatcagaaatacatatattgcaaatagattttttttcaatctggcttgccttttgctatcttagtgctgtctttggataacaaaagtcttaatttttataaagtccgatttatcagtctcttcatatatggttaatgccttttgcatccaaataagtaagtcatctcctaggagagccacctttgctagaaatagaaagcattcaggagttgaagtgtctcagaagcccatctgagagcccttatgatttcccacaaaccagtggaggacttagcagtagctcattagctcaggacttccacgttttcatgaaaacatcgctgaggggagataaccctatggcttttccagacatcagtgacttgcagtagcgtgagtagaactggaactgtacccccaagatactcgaaatgaaggttaaggctgtctagtgcaggagtgtccagtcttttggtttccccgggccacattggaagaattgtttcaggccacacataaaatacactaacactaacaatagctaatgaactgaaacaaaaaaaatctcataatgttttaagaaagtttatgaatttgtattgggccacattcaaagctgtcctgagctgcatgttggacaagcttagtctagtggatgaatcgatatttggagagattgaaagagttcaatagatttggggtctttggtccctgagcacacactgggcataaaacaggagggtctcaggaggccatggagttcattaatctgccccagggccatggtctggcctccctaccactctgtaccccagccttcccattccaaaagatggctcttgactcactggcttatgcctgaatgcccatcttccagctcagttctcatagcctaaggctttgtagtcctttgcttccrtttacaagtggacatactgttaggaagatggaacaggtgaagtgttactggtcttgtctgtcttatgagtttttagagccttccttgagaagcctgttaaaaacacactcatgcatatattacacctataacagtctcttggtttttaaaaattacctcaatgatccacatttactagaccatgtcaaacaattcagaggaatgtaaagtacaattgaatctctctcttccaaccttcagcctcacctctaacccccataaccagtgtggacacttcgatgtgtatcttcctgtgttttttctaaatatatagaaacttagatacaggattggttggttgtttggaaaagcttgagggtggtgtttcttaaaaatacaattgcattaaatatagtgttctgctactttgtttctttctcatataatagcatattctggataatattccaaacatatgtttttgtcgagggggaagaatatgaaagcacttgaggaagagtactgctacttctggggaggaggagagaggataaaaggcagaaagcactgcccatctcatggggactgctgctggccacccttctaaaggtgggatgtggccagaacacaattctcctccctctccaggggttctggattaaccactgtaagggaggctgtacatgttttcagttttcactttaattcattatgttctatcatgaaatagcagatttgtagcctatcctattgctgtaaacatgcagtcatcacagggcagtttgttttgcacttctgttaattaggcaattttaagaatgaaagggcctttcttcctaataccaacattttcaagtttggtaatagggatgtggggctgaaccaatcctaaatattaaaagtaaaatattggccaggcacagtggctcatgcctgtaatcccagcactttgggaagccgaggcaggtggatcactaggtcaggagatcgagaccatcctggctaacacagtgaaaccccatctctactaaaaaaaaaaaatagaaaaaaattagctgggcatggtggcgggtgcctgtagtcccagctacttgggaggctgaggcaggagaatggtgtgaacgtgggaggcggagcttgcggtgagccgagattgcaccactgcactccagcctgggtgacagagctccgtctcaaaaaaataaaatgaaataaaataaaaatatttttcttgcttttgcctctctgtattattttatgttgaatttcaggtttggggttccatactgcaagtacaaggtggggttggggctgaggagtgttgatgtctcccatgaataggggagcagctgctagacagccatatcctgtgtcctctgcctggttcccggttccttaggggccctggctgctgtcccagctcatttggaggagggaactcaacctgaccttgatgacagcagtgtgatttcctgggcctggttacctcccttaagtcacgtgggctgcgaatgagcaccaggtcatgcacgggctcagtcccttgttaacggagctgaggacaaggtctttctcttctgcagagcctgggctaggtttcccatcttagggtagggaaaaagtcattcatgttttacgagggaaatttgaagttcagtatttgtaggtaagcaccttgaaatgtttctctggaaagcactgtagaaatacattatctctaatggcgctgaacaagagttgtataggaactgtcagtgctgatggatatattttctttctgacccttctttttagaacccacacagcagttaaaatagctccgagatacagtgcacctgtaatccatgtcctggacgcgtccaagagtgtggtggtggtaagtgggtgaccttacattttattccagatgtgttggaaagcttgcattacaagtaagggtttaacttaagatctattcatttttattcagttctactaaataaaggtcaaagagcagcctgaggctcatggtgtgcctctgcagtgactgccttgctggaaggaggtccaggtgaccatgtcctatactttcaaagacaattacagaactgagcagcagacaggtagatggcctggcaccaagacatctttgacctggacaccaaccagacaaagatttcacccactcacaaacatgaatagatgtttgcttgactgtctaaaaggaatgttggatttttaaatgacctttttccagatagaaaaacaaactcaaaagtgtcctagttgaccctacccaaagacagaaaaacatctgctagatatttaaaacccagaacagtggtttctgcttctctgtgaacatcataaacaattcacccacgtcctgcttttctctttcagtgaagcctaacattctatcttgttataggtttcattgttttcactgaataatgggatataacagctggggtgcacccgagaggcagtgtggtccaggggtttccaaattgatttcagccacagaatctttgtctgttaagtgaaatcaatttggaaacccctggaccacactgcctctcgggtgcaccccagctgttatatcccattattcagtgaaaacaatgaaacctataacaagatagaatgttaggcttcactgaaagagaaaagcaggacgtgggtgaattgtttatgatgttcacagagaagcagaaaccactgttctgggttttaaatatgaagcagatgtcacttaccgtcccatcccgctcctagtgtccatcaaaagagcacagtttgagaaccacagatttagcccagccttcacattgtgcaggcgaggaaggttacggaggtggcctggtgatctgcgagacttccagtgatgccatgcgacctggactagggtgaccgcatttcctgagctaccttccaaggaaattatttcagatctgcgaatttatttacatgaaagttatataatcatcactaacattattgaaaatgtgtagtgtgccaggtactgagctaagtgctttacatggattttatttaatcctcaggctaacctcatgatataggtattttttggtccccattttagagatcaggagacagaagaataaagagattaggaactctgctgagaccacacgtctgtcaaagtggcaggtgtgggatttgaatgcaggttatcttactctgtgttaaattaaacttgtttcccattaatatttaacaattctccttcattaaaaaggataaaattaactcagtctgggatcataaaattgcaattttttatttgccattgatgtagacaaatatgcaaataagctatatttctacaactcaattttaaaacaatttttgtttcttattcttggattgtgctccataggagcttatgtcaggtccatggctgagtgctgtgggcctctttttaacacttgtcattattttcaaacactgatgtatagccctgaatagtttcctttcagaggcaagacttttggatccatttagttgcacagtgccaacctttcctctataggcaggggaaagaatcagccctttgattccatgtttggaggacaaaccccttcaccatttttttttttttttttgagacggattgttgccctgttgcccaggctgaggtgcagtggctcgatctcggcttactgcaacctacgcctcccagattcaagcaattctcctgcctcagcctcacaagtagctgggattacaggtgtgcaccaccacttccggctaatttttttgtatttttagtagagatggggtttcaccatgttggccaggctggtcttgaactcctgacctcaagtgatccacccgcctcggcttcccaaagtgctgggattacaggcgtgagccactgtgcccggcctccttcaccatcttgaagagctagagcagtgggggccttgctgaaagccaggcagggaatgaggagtgggtgtttgtgctctttccagtttggtccagccaygcagccagcagtggttagctcctcccgtgtacaaagaaacgaccacattttgaaattgctaaaacrtaagtcagatgataaatcatgtgggtaactgctggtgacacttcaggagccagtggtataatttgtttcagttggttgtgggctcattggctcaggctcttttgatctaactgaaatgaacatggaacaggatcacattttagcagctatctcatatatttggaagattccaaaaagatgtagcaaatacttaatggttggagatttagacccttgctttcttttttcttctttaataaaaaacgaggtgccaatattttattctttttaaattataaaatatcttttcagtttactccctcttattgtgtggctgttgccatgaaatgttatttttaaaaatgaaggaaaatataaactgtgatatgtcccagtggttggcatgaaaacacatgatggatttgattttttggtggaaggatcatgtaggttagcgcacatattgaccatgaacttgtttccgtcaagtaagtcagactgggccagaaggggcctgccactgtggctctgggagcagcgggcttcatggggctgtgcaaggtgccagcaaactgcagcggtatgttctgtctacacaatagcaccagcatcagggggtcgtagattctctggatgtcaaggacatctggttttgctttctcagagtgtataatctagcaaaatgcaagagggctttaaaacattggttacatacacttcagggagttcagagtaggcattcccttcttgtttcattgggctgtgctgggtttcctaaacgaggactccattgaggtgagtttaatgtaaggctggggaatactttgtggtgtgaacactatttaggaacctatttttggcctgccacgatggccttttctgattgtattcctgaatgaggtgattttgttttatactaactcataggtgattggattgttattagagatacttagaaaacmcacatagagttatagaattttaaagctggtaggcactttagccgtcattcagtctgacttccttaagttcagatgaagatgttgaactttcttgcctttttgtgtattagataatcctgctggagaatgcagggatggggcagtgctatgtttattttttaactgatgtgatcagtagctgccgtttcttctttctatgtaattttattttgtgttttgatggtagctattcttctatcaacttgataatcataataacaaataatatttagctgatcctacttttacaatttaatgagtagacttcacattttctcagattattggtttyctttccaattttagcagaaagtcagtggactatgaagattagcctcattccctcagcaaacatttagtgagaatgcacctccagacactgggctaggcaccaggggcatgaaggtagtgaatgtgtgattgcagctctcatagggctttctagtaagggaagtggatatataaattggaactaaaaggctttggaaagtgcagtagtagatgaatagaatatctttgaaaccttgagttgggagtttcttaacccagagggttcccaagaccaccttcaggttcaaagtttcactagaaggacacagagaacccagaaacactgttatgaccatggtttattgttgtgaaaggatataggttaaaatcaggaaaggcaaaaggcacataggatggaatgcaggagagaccaggtacaggctttcaggagtcatctcccccatagagtaatctggatggtgcttatttcttccgctgatgatatgtgacaacatgtaaggagccttgccaacccagaagcttacctgagccttcacgtcctgggtttttattgggggttggtcacataggcccagaatgcccatgtgtctagccttaattgttcagtcttcagtccctgcagaggtcaaacataagcatgagcgaaggtcccccmccataaatcagactgttagcataaacgatgtgacgtggcccagggtgccaggtatacagtgactctcttatcaggcaggctgtcccaagggtttagagtttgtctcccagaaaccagtcaaaggccagtcccttctttggcttgtgcagggtttgaacatcccaagcccactgagtttaccttttcctgcacgccaggcaggaattagcacagttggtgaagggagaagaaatgaagttaaggaagccttcctgaaggaggtgttatcagcattgaccattactacaccagttttatcatcttttgctcatctatggctatcttgcattttcagtgttcccagctgttagatgaaaatctaaaggatgaatactttgaggaaatcatggaagaatatgaagatattagacaggrcsattatgagtctctcaaggtaagtggtagaaacagatttttgcttgtttttaatgtgactnttttttatgatcctagtttttaatgtgactttttaaaatggttttgaggagtgtaaaaggctttggatcattttagagaatttctgtcttctagttcaaatcagaggtcttcantgtcttaagttcccaaataatttttggttgtattgaaatgaattttatttattcagccaaacatttactgggtacccagtaggtgttaggggctgtgctagatatcagaactatggtaatgaataaaacatgagttcatactcagcagggaaacaggtgctgaaacagtgtactgaaatgactcccacagacccccattcttcaggagctaatggaagaaaatggagacatgaggcaggaccagtataagccttttgcctgactgcccaacactgactgtgcagaatgatgttttaagaactgtccgtctcttgatcagcttcagggaatccatggagaacaggcataattaggctttggaagtcactgaaatatttctttccggttatctgccttctgggctttggkgggagcattttgggagttgctaggcaagtgaaatgagatcaacagcatgaggaaaacacgctgttttgcttctgaggtggtaggtaggccaagacgcagtggttggcttttttctctctccttaggttcgcccacagtggacagtttctttaattctaccttctggtcctcagggtgggccatggaagaccagttaacagctgacctcaggtgttctaaaagtacaggtcagacacccctagtacctcaggttcaggccgcagaactaggctygtatttatatatcagcagttaatggatgcttattaagtctttactatctattgttctggtgccaatgtgaawccgactgggtagaaaaggaagagytttttagaataaacattctcatgaataagagcatttgctttcttgcaaagcttacataytggccttcttggacatgttttcacagtagttgtagaaaagctaagagtgtctaactaatttttctttgttttttaacaggagaggagatacttacccttaagtcaagccagaaaaagtggtttccaaatggattggctgtctgaacctcacccaggtctgtttggctatggactagagaaagactgggtgtggtaactgacagtgtgctgaggaaatacatgcatttacttggctgcaaaatcaaaccagcagctaacgactctcaactgtgtctaatgctgatgagtgactgatgactggaaagaaagggaataggtaccatttatggagcaggtgttgtgtgccagataccatcctgagatggactcatagcagctctctgagtccttcagacaactccataatggacatgggaattatctgcattttaatttgaagaaactgagttttgggtggaaacttgaaaggttactaggaatctctctctggtctgtcttctaaagccatgctctttcctctgtgctgtgcttgcgtgggtccccgtctccttgaaggaagttctgtggaaacctgcctgggtggtactgtcacctgaggtggcctgggtctttcgcaggcccaggggcagatgtgaaatgtctaaaatgggaaacgcctttgcaktcacacatctttaaaacactgcagcaaagcaggatcctctatttcttgctttctctctgtcctctctctggatgtttccctctctttttatttcttttatttggtttcttcctttttttaaatttctagccacctttcttgcctcatataggtgttcacaagggaataaaacgtgtaagatgttttgacaggcgcagagaggcgtgagacacaaatgcaaaaccaagatagagtgaacaggggttatattaattgaatccatatttccaaggtaatgtatcaaatcagctttcattgctcacgacatctgtgttctacacatgcttggcagagttgagcggattaaattggaaatgtaggtgtgcttggttctaatttcatccttgctgagttcagcgtggtttggtggaaagaatgccatattgggagcctggagctcggggttctcatcccaacgtggctcctgactctgactcacggagtgaccttgagcagcttgcttccacgtttgacagtttttaccacgtaaaaaaaggagttactttttggaaatgttgtgagggtaaaatattctgtgaaaacctttgaaaaaatataaattgctgtatagttcaagctccgattatttgctctgtatctttccctgtgaaattggaataataacacaagggcaagtctgtttggattaattcaracatccaaaacgtattttgctggaaataccctccaaaggcccacagcacctggcagcggttgggatgcttttttagtggcygctttaacctctggcatgggctactgcagggtcygccctgctgccccagggccatgggccactgaggsctggccstctgaaatatgtcttgaggacagccagtcctrgggtagttgcaggaagtcggtagggaataaaagagggttttcttttacggccctgatggtaacacctcaaacatttcttaaattctgggagacgagagagtccatcagtggctctgcagcagcatgttctctctgccttcccaggcgggaggacgcttgaatcaagggtctatctgtagattccttttagtttctctactaaggggactataaaggctttgttaccaacaaaccaacataataggatatttccaaagaagggattgtcccgtgtagtagaaggatgatgaggaacaaatgggaaagggctaccgtgaacaagtatgaaaaggtagagatttccaggcaggagtaagaagtcaaatgagagaaaaatactctagaagcttctgtgttctcccagagcccctgagattggtagaataggaagttccctgatccctggttacaaatcaggaagtagagagacaggaaggctcggatacggcaatggagccaacaccttagactccagcctaatcctgccatgtcagaccagagtctgaggtgcagaccacactacagtctggagggcagatggcagtgctgctctacctgccccagaaagcccagcagcaccatctgtctctgaagtcttcaccattatttaaattatgatgtattttagactcaccaggaggtataaagaacaatatattaaacatccacgtatacccactagccagcttaagacataacctaccatctgatttttaaaaaacgaaacaatgcagagtgaacagaggttatattaattgaatccatatttctaaggtaataaatcagcttttccttgctcatacatctgtgctgcacacatgcttggcagagtggaggattatgtattgaggagtatgtatcggaagtcccacatgtgtcccttcctcccctgcagaaagcacagcagtcctgaatttgggacttcatttgcctatactttgagcatatgtgtcagtagacaatctagatgattgtttccggttttgaaactttagataagwagcttactctccatgtctttctggacatgttcttcatgttctttcatgttcttcatgttcaccttgtcttcatttgtgcaagtgaggattaacccgtctgtctttccttcttgggcagggggtggggatggaagggttgagggaacagtttccaagggtggtgtagtcagctgcatgtgaagaatagttttatttaagactcagtgcagaattactccttctccacgataatttaaagttcccctctttgtaaaacaactcctacgggtgacaggagggaggcggagtgtgggagttggcagagcagtgaggagctggcagggaggcctccatcaggcagggtgccagcgtcagcattgacaaccatacttctctcctgtagtgaagcccacgtttattgggacccaggtctttgaagactatgacctgcagaagctggtggactacattgactggaagcctttctttgatgtctggcagctccggggcaagtacccgaatcgaggctttcccaagatatttaacgacaaaacagtaggttagtgcagtaagtccttcctttctgcctctgatattcaagctgtgggattgtgactttgaagaccggaatcggtgaggagcagtggatttggattgtgcagattacggctgctttcatattgctcacctgcccaactttttaatggttttcaawctgctagattggtccttattgcatcaactaaatttggtatttactttattctttcaataaatgtttattgacatcagttacatgctgagcactagggataaatggaagacaatataatccctgctgtctagcacctgactagctggcacatccaatagtaatgggccctgcctgggctcctgtggacataagaggagatagagctcagactgggaggtcagggcaggcttcctggacaaggtggtgttcgaactgtttttgacgattcagtgggagttgccgtggctgggactgtggatgtgatayggtgttgaagaaaaggtcattccaggtagaggagacagtgtgagaaggcacaggcacatgtgcctatttggggaactgcaaggagcccattgtgcttggagcattggggagggaatggggatttagggtgataaactagagaagtaagtgaggtgttaaattactacccccacttctcacttctagccttaccccagaatccaccgacagagacacggaatccaaatgcaaagccattcaaaggatcaggtagtagccagatcagagcagcagggaggggtagactcacagaagcatgggattagggctgagaggagcctagaaaccagccttttgccaagtttcccacgggggggcgtgcctgggtgtgcgtgttcggatgctgagactcaggaactctcaggtagtcaggaacgtggtgatgagcaaggrgcttcttagtgtgctgcccctgaatcatcacaggtgagctgtccaggggccgtgggacaggcttctcaccatgggcagggtggccgagtctcacggaaaccgagatggtgtcctyggaggctggctcccacygcaggtccgggagcaggccagcccaggtgcagcattgaagccacatgtgaggatttgggycacacttcaccccttaccactaacgttccctgtacacatacaattccactgacttcacagcgacctctgggggacggggcctgtgccttatattcaccatgctttgtattctgtggtgtctgggcctggacgcatacagtgaggatttaccgagtctgaktgcatagggtgaggatgtagctgtccttgtttaactcttcatggtactgttgaaggccccaaattgaagaatcccttcagaggttgttacggtcaaaatgtcaatcgttacgaattatattgtagttgggattaaaagcaccacggaatacgaggcacaggtcgcgtctcccagaggtcactgcaaagtcagtggagttgtatgtgcacgaggaatgtcagtgaggaatgtggcctgctctttctcatcctctctgacagaatgctttggggagccacagctttggctctctgctttttgtccagtggaaaacttgagtggcttgaactgggagaagcagactgtgggagctgcacttagcaggagccgcaaagccctggctgttccactttaagctgggtcagtggcaaacaccagaaagcatttgaggaaaatggagaagcctgaagagggaaggtgactgaggaggggtaatggcttttaaaagaagcattgtttgatggttatttttggcatctttaagtgaattctaattctgtttttctaataggtggagaggccaggaaggtctacgatgatgcccacaatatgctgaacacactgattagtcaaaagaaactccgggcccggggtgtggttgggttctggccagcacagagtatccaagacgacattcacctgtacgcrgaggctgctgtgccccaggctgcagagcccatagccaccttctatgggttaaggcaacaggtatggaaggtgtactgacagccagcacaccgctttcgcttgtgagtttaagcactacacaaaagagctttgcataaatgagggtctgcttcacctcctcccaaatgaccaatcacatgcccaagaagtgaccagtcacacgcccaagcccaagccatctgtgaggacgrgggagagaaggcgccaccatgggtgtcagaggcaggaccactcagcaggagtgaggcgtttaatattgtgttccatggatgggcgaggaccattgctgctgtctcaggtggtcacgtgtcaggatctcagtcttcttagcttctgaagaaagagaacactcacttgttcaaaaacgtaggttaatatctatgcatattattaaaatagactgtcaggtggcttcccttgaaaggggaagacaggtggaaacaaacatttgcagaatgtataccaggtgccaggtgcatagtaaggtgcttgatggtcatgcttttaatttccacacagccgtgtgaggcagtttaagtttgtgttttacagagaagatgaaggatgatggagattgtgctgggccccccaatatagagaggagagcccagcctgtacatatccccagtggccgttctttgactgtgctggctttttttctttcgagtgacgagaacagactcttctcagcaacttstctctcatcccccccacctttgaaaaggcaaatatcatatgcatgtccctttagctgctgtaaaaaagagtgtcttaatcaagaattggaaccagaattcaccagagtcattaacaaatttaataatttgcagaaaattactctgttttactgccattttcagtcgttcagaaataataatgttggctgggcacagtggctcacacctgtaatcccagcactttgagaggccaaggtgggaggattgcttgagcctaggagtttgagactagccccggcaagatggcaagaccctgtctctacaaaacaaatttaaaaatgagccgtgcactggggagtgcaggcctgtacttcttcagccagctactcgggaggatgaggcgggaggatcacttgagcctaggagatcgaggctgcagtaagccatgatcatgccactgtattccaacctgggcaacagagtgagaccctgtctctaaaaaacaaacaaaaaagatagtggcgcattttaatcccaaccacaatataattcataatcatccatatttttaccataacagcatctgaagggattcttaaatttggggccttcagcagtaccatgaagaattaaacaaggrcagctacatccttaccatatgcacttaggctcagtaaatcctcactgtatgcgcccaggctcggacgccacagaatwtaaggcactggggttctaatgttaagttccagcccctcctcactagggaatttgtggctattcttttacagacataactgttcaaaaacctctgctctagcccagtctttcatctttcaagtcctgtgtcctctgcgatctctttttactttcagtaccattcatgtccgggcagtctgtgacatattagggcatttaatagaatgaattctcagagttcacctttttagtagcctctggagaggggaactgggccaggcacatacattacctacccaggtagcaatttctcaggaggggctttcctccagtgcactctggaacattctggtggcagtgccttattactctgggagtctgctcttctgagtaggctctgattgctgtctcttsgaaggtaccatggggctctgtgatctctctctcctgtggcrcagggaagctttgggtccccctctggcctttgttagcaaagaataattgatgggccgagtatacctggaaaacggcttccccatgcacagctgtccctgagctctgtgacattcctgtgtgccattaccaaacacctcctcgcctgtacttaacaatttcctgcyctgtgtcartgaagctgtacttgcttccacggcgggcaacgagctgtgaagtgtgtgggttggccactcattgattaattgatcagtcctgagcagtaccatatatgtagacgcatgggttgtggtaccagccccctggcccctcccactgtctgaccttgggccagttgatcaagcttcctatgcccctgatttcttgtctgtaaaatggagctgatggtatcacctatgtcacaaggtggttgagagggttaaatagtaattcatataaagcaccaagagcaggcatacagtaaccactgaatgagtattataagctatttaccttctcagcaaatatttattgatttttttaatatgtataagactttatttgttaccttagttgcagggaagagttgcttatgagctgagggtgaaaaatgggggagggtaggccccagggctgtggagaaaatccagaagcaaatcctgctgaattcttggtttggtgcccagccagccctgggtgtcctcagccggctcctgtatgacccttgaccccaccccacatggcaggcagcacatggcctgggcatcgctgaccccaacagtttgttgtttgagctgctgctgttgatggagagtggaggcgcttccatttattggatctcttttgaacatggtgctggacttaattgaaaacacttggggacaaatttttttttttttttaaaccgtgactttagcacagtgcctgaaggcattcagtaaatgtttggtcagtgtgtgaatgagccagtgaactggtgtcttgacaatttatgttacgtcatgtcatacattttttaaaaatctcatttcatttgtttatcttacaaatatttattggatactcactatgtgtcagacacaattccaagtactggggatgtaacagtgcacaatacaggctgccatctgtgcgttgtgaagcttattctcatttgacgatacccgattgctcttcatggtgtgctggcgccacrttcttgctaacggcgcccccgcacactcctacactccttggttttaaggctgagaaggactctgccagcacggagccatactactgcctctcagacttcatcgctcccttgcattctggcatccgtgactacctgggcctgtttgccgttgcctgctttggggtagaagagctgagcaaggcctatgaggatgatggtgacgactacagcagcatcatggtcaaggcgctgggggaccggctggcagaggtaaggcagaggcattgcgccgagrggctgaggacagaggccaggcagtagggagcctggggtgggtgcctgaagactgatcagcccttagaaccagtgtctttttttttttttttcttgagatggatgctgctggctttaacattatacgtattttaatattatgtatccccagattgcttgtgtacattatctttgaggcaaagaaaaaccttgaatggtgccacagttggctgttgctcttagagcctttatctctaccttatctctgttgtctctctttgcttgttgtgatgtgacattttcctcagtaccccaaaaaattaaaaacaaatttttatttcagagcccctcgttgtaatgctggtgtcatctatagattcttcatcttcctctgcatggaatgagggtagtagcctttgccctggggagagcctctcccttttcctgcagtgaacagtggaggaactagcagctgtatggtcccagctgctctttctggcccgtggagctttggattgacctttagggaaatcgttaattttaaggtctaaaatctttaggtcattaagtatggtccttcagagctcaggttgaggccaaaattgagctgcagagcagcagctgatgaaagtacaaaccaatcaagaatccagcctgtttcctcttgtcaaatttcccctggctgtggtccagatgagggagggtgtcctcatggttctaattcagggggtggaggctgcactgatgctgtgagcccctgcgtctgcctaagcatgcctgctgctttgggtcccaaggcctttgcagaagagctccatgaaagagttcgccgagaactgtgggcctactgtggcagtgagcagctggacgtcgcagacctgcrmaggctgcggtacaagggcatccgccyggctcctggctaccccagccagcccgaccacaccgagaagctcaccatgtggagactygcagacatcgagcagtctacaggtaggagccaggaggctgcgggttcctgtcttccttcttcagtagatactcttatcagcatactggcacttagggttaaacatgtttttaaaatggaagggcttctaatcacattgtcccttatgctgtcctttttcactcgtagcwattctgcatttyacttcagtattactgattagtattcttacatcattatttttagatgtatcaatttaaattatttcctcttggcctacgccagatgggagtttagcttatgtataccatcctgtgcctctcctgccccagtttcctgtcacaggcatggtgatgtctttaatccctcccttagagaccgacctttgtccctcagtaatgtcactttgcttcatgctcttgtctcattgcttgtggatggtgtccctgrgtgctggtcttgcagagcgcccagccttcccttcagccctcttttctctttacttttacactgttagtaacatttatattcttctgtaatcataattctctgttatgttttgcctgtggattgattctaawagctgaaaatgacaagctggcatgtgcctttctgagacaaaggcccagacacccggcctcagcgtcctgtscccagagctgacttggctcgtggttctgtggctgcacattgtcatgtcratgtcctggttctgtcattactgcagagttcatgtagttgagatggcccaggctaagctcacagttttcagcggaattaataaaaagcatgccatcaaagctgataaaggcatccagatttaagtgagaaaccatgagctgtgctgaatctgcttcagcaggaacaacactaactctaggagtcatgagatctgggtttgagtcctgtttctgccataagctagctgggcgacctctggcaaagcactcacccttcatgttgctctgtttccttgttcatagaatgagtggcttcgaatagatatccttgagggtctgtttgagctctcagatcccaaggaaaactgtctcttctttctcacaatgttgtgggttccttcttcactggagctctcagtcgtccctagtatcagtggccgcacagagccggtggaggctgttcagttgttgttctcatctccaggggtagagctcctgcctgagaaggtctaggcttaggagcaaattagggcacctgtaactgatctgggatggctggaggtgggagtgtagartctttcccaggcctgtccccctgggttagaggagatctgcatgtcccgaatttgtttcttcacctggcaggaatttgctagacttctctgatcacagctttcatgctgtgtcatgtgtctacctagaaggcatgagctcgctttggttcacttgttcaacaagagttcattgagtgcctgctagctgcaggccctgtgctagacactgagtccataagcattttccctgtgttgctccctctaggcattaggttaacakaatcattagcaatggcacctgcttcagcagtctcaggcctctacttctccartttgaagtccaaatattttgctgtggggaagatttccaaggatcaggtaagctagctgttncattatatgtggcttgcctagttcaaatgaaattctagaacctctctcattttaaatgtgaatgagaataaagtgaggggaaargatgaagaaatttactccagttaatgtcttaatttgatttcaatagaatacctctattctagccctcacttctacatgcaagccacacacacgcacacacacacacacacacacacacacacacacatacagcttctaagcatcagatgtttactacatgtttttctgcccagagaaaaaggcaacttggtagataaatatctatctccatttaactctgtagattgctattaagacaagaaatgcaaggtacttaatgtttcttggcaaatcttgtggaaacttctattccaaaagtcttatcatgttggtttaataaaatgcttctcatcttttgcaggttgaggattatgcattgaggaagaacatatctgtggctgaggttgagaaatggcttggacccattttgggatatgatacagactaactttttttttttttttgccttttttattcttgatgatcctcaaggaaatacaacctagggtgccttaaaaataacaacaacaaaaaacctgtgtgcatctggctgacacttmcctgcttctggttttcgaagactatttagtggaaccttgtrgaggagcagggtcttcctgcagtgcctggaaaacaggcgctgtttttttgggaccttgcgtgaagagcagtgagcagggttcctgtggtttccctggtccctctgagatggggacagactgaagacagaggtcgtttgatttcaaagcaagtcaacctgcttttttctgtttttacagtggaatctaggaggccacttagtcgtctttttttcctcttagaagaaaagcctgaaactgagttgaatagagaagtgtgaccctgtgacaaaatgatactgtgaraaatggggcattttaatctaagtggttataacagtggattctgacggggaaggtgtagctctgttctcttcggaagacctcgttttctaaaggctggactaaatggctgcagaactccctttggcaaaaggcatgcgctcactgcttgcttgtcagaaacactgaagccatttgccccagtgtggtcaagcagccatgctttctgggcattttcgtcctcccataatttcatatttccgtacccctgaggaaacaaaaargaaatgaggagagaaagttactgttaagggtggttaacattttttttgttttgttttgttttggtttttttttttttgagacagagtctggctctgtcgcccaggctggagtgcaggggcgcaatctcggctcatagcaagctccgcctcctgggttcatgccattctcctgcctcagcctccagagtagctgggactacaggtgcccrccaccacacccggctaattttttgtgtttttacaaaatacaaaaaagtagagacaggatttcactgtgttagccaggatggtcttgatctcccgacctcgtgatctgcccacctcagcctcccaaaatgctgggattacaggcgtgagccaccgagcctggccggttaacatcttttaattgtttccaggattgagcaggttctcagctgggctctgatatcccgtgcggagttggacaagtgggcagcataaagtcactcatttcttaccattttattcccctcaattctcaatatattcagtaatgaagaatggtgccaccactcaagcaacaagcctcaaactcamccatgtcatctttttcttggatgattgcagttatttcaaaaatttgcatgcaaaatatacactcatcctacttcaagatggtggtggcaatagtcaggagaaggtarcattggagtcctggtttgattcgaaggatgaagacgaagaagcaagggaggaacaaatgaagaaccatctttgttcatgaataggaatattcaagattataaaggtaycaggtctcctaaaattgayctatggatttaataccattttcaatggaaattccaacagattttattgaatgaaacaagcaggtgtttatatggagtagcaaaggacttaaaattaccaaatgcttctaaatatgaaggagaggttggggacacgcaccctatgtgataccaagttttattgtcaagacagtgtcatggtgcagaggtaggcattytgagcaggggaacaaaataagggcctagaaactcacccgtgcatatgttgacctttgcaaaatgacctggtgacatggcaagtcagtggggacaggaaggaccactccctaagtaatcccagaacaatggctattcatgtgggaaaaaaagaaattttactttctctcaccttacctggtgataagttccaaatatgttaagggctttaatacaaaaagcaaaaattgtcagtgtttggatgaaaaaagccttagggcaggaaagaatctcttgagacataaagtagtaatcataaaggacaagatggttaagtcaattctgttaaaactcaaggcttatattaagcaaacacttgaagtgagaagatgatccacaacttgagaagacatttataatacaaataactgatgaaggattcataatcacaaatatagagaattcctatttaaaaaaatagaaaaatagtgaagactacacaagaggaaatagggcttttaaataaatagatgttctgtagcattggtcagggaaatatgaattaggaccacaatgagattccattttatatccataagatttgcaaaggttgggtctgacagtaccagttgttagatctgtagggacttgtacaacattgtggatgtgtaaacaggcaccactgctttaaaaaacaattatcccttacagacttgaacatttgcagacsttatgatcttgcttccaactcccacctgtatgtccagcaaactcttgcatgtggccactaggaggaatgtgtaagaatgttcatagttacatatttataatagttaataactggaaaaagtgaaatgtatgtctgtctacaggaaaataggtgaataattagatatatrtattcattctacgggatattattcagtagtggaaatgagtgaactacagctatacctcacaataagaatgaatctcagaaaatattaaggaaaaaagcaagtttgaagagaccacatggggcgtactatttttattgrgcccaaaaacaagcaaaaccaaagaatatgtagtctaagcatacgtatacaataaaactatgctattaaaaaaaaaaggtaactgataaaccaaaattgagcatagtaattacccacagaaggaggaagtggaagggacaggagcacataggtagatgccaagttatgcagctgttctggttcctcctggtaggcttacaagtgtttactatatgctattaatacattatactttataactaatagataacagttttttacatattaaatatgttctacttaaatatattataaaaaataaaggcaaagtggaatgataacctaaaatctggtatggtgattttgtaggtaatgtttgtatatgtcaaatacagtttttaaggaaaggaagaacatcttagggtaaacagcagctagaaaggtgaggggcaggagagtggtgcatccttgctgctgccagcagtgcccagataccaggctttggggaatgagtggatggctggaccatttgctaagacagaggccaggggatgggagaaatgatgagttttggaaagattcgatgtgactagactgaatataggcagttggatactagactttggaatttaaaaagaatgtctggagttagaattgagagacttgaacgtggagatggaggtcaggctgcagtgcgatgggatcatctatggagcatatgaggagaagagaatctggaggaggaggagggggagccagcaggggagcagctgtgggttggaggaagccaggagggagagtgcaatgccgagaaagcaatgaagagcgtttcgaagcatgccagcagaacccaatgctgcaaagaggcctgggaatgggattgctgagggcccttctcacagtgagcccctcaagagcagcgtcaggggattgtggggactgttggcacacagctggctttgctaggttgaagacaatgggaggtgtggaagacttgttgactcatttaaagaagattggagggaaaggtaggattgagagtgtttcagacagaaaaaggattatatgctgagggtaaagcacaagtacagagggttgcagatagtgcagaagtctttaaaaacaattattttaacccaacttccagggagactgaatttcttctgccagtcagtaacaccatcaacctgggagttgcccctgacccctccagtcttagctcctgctcctgtaacaaaataccacaaactggttagcttatagagaacagatgtttatttcttacagttcaggagtctggaagtccaagatcatggtgccatcatggccgagttctggtgagggccctcttctgggatgcagcggccagcttctcatgttctcacagtgggtggagggtaagcttgctctctggcctcctcttaaaaaggcactaatcccattcatgagggctccaccttcatgacctaattacctcccaaagatgccatctccaaacaccatcattctggggattccatttcaacatgatttgggggatacatcagaccataacacttttctttttctcaaccttcacatccagttggttctcaagccctggcgattttacgcgctagataggtcttaagttcatctctacgcctgccctggttaaggttctcatcatttctcctctggattcatctgcaacacaggctgccgggttggttcccacctcctagagctggaagagtgggctctctgattctttacacccccgcctcaatcctcctgctgcctgaataaccatctccccgtgacctaggatatatcccagccccttagaggcatgcaaagccttccatgtctgaccctgcctcatgtcttggaagccctagactgctgctgtaccctgaaggaggtacctgctcacattggcccctctgtctggaataaccccaccccggttccacccaagtcaggaaagcttcccaacccctccctcccaccaccccaaagctaagtgaagtgacccctcttcttgcctctgtaacaccgccatgcacatttcatacagcccttgctgaaacttcatctagttctctgttagacttaacattccctaagggcaggtttggaaccttactcatctttatatggcgtctaaaatagtgcttgctttatgataggtgctcagtaaaggttgtcttgaattgagcagatcctctagggacaggagttggatggagagcagactgtaaagcctcatgagggcaggggccctgcctcttcctgagctcaggatacccagagcctagctcagtgcctgccatgaaattgttcactccatcaagccttgttaaatgagttcggggcggggggagcatgatggttttctctctctcagaaagaaagcgctgtatcaaagccctagcaccctctctacacccaccttcagtatttcatattagatgcggcccaagtgatactttctttaccgtcccgtgaagacagcatattggcagccctgcaaaaacaaaacaaaacaaaaccctcagttcatggcatacttgctataaatcagctatgtgtattgtcaaattgtagaactgaaagtatattctgattcggtgtgtgtataaggaaatatacaccagtatatgcattaaaacgtcaagaagagctgggcacagtgtcacatgcctgtaaacccagctattcaggaggctgaggtgggaggatcggttgaggccaggagtttgaggctgcagtgagctatgattgcacagctgcactccagcctgtgctgagacctcatctcttaaaaaataaaaaataaaaagtctaagaggatacacagaaatttttaagtggttacctccacggaatgggattaggggatcagaggtgagggaactcatggtttggctatttctcgttctttctgcactgtttcaaatttttacaagtgtatgttattgtacttttaaaaagattagcttggcaacaagtctagcctgaaatgggtgctattttgactagtctgagtgaaaagtgaggatttaaatgaagtaacccctaaactcagccagtcccatgtttttttaacacttggaatatctaattccatttacactgcattcttcaaatgtaattttcaaagatgccttttgcctcatcccttgcttttaagtattattatagacttttggagactcacgaaacaagcaatccctaaattctcgcccaggaaagtatcttggattaaatggtttttgagaaccttgagagtgtatattctatgaaatggaagaaacaagaactagacagagtcacaaatgctgttgatcacagacaatctctgccatccataaggtaaatgtaatacatctggcgacctgctgagtgtgaacttgcagcaggtgaggaaggaactctgaactctcacaatcttgtttcttcatttcccagagagaaactcggcaaagagaaaaaggacatttccctccaggttatctgaaagaatttcaatgcttacctttaatcatgtgacattgtttatcttggattaaaagaaaagaaaatgtatttattttgtgcatattttcaataaaatatataaaatcgagttggtatatagtgccaaataccattaattaaaaatattttaacctgatatgatagattgttgaatttttaaaaattgtattgagatgagcttatcaagaaaatttgaaggattccaggggaaaacattttagtgttaaagtacttgattatttttaagataatgcagctcttttcagaaaaggtagcagttagctccaagagatatttcaatggctcatataaagccttccagtcaccatcagatatttccttacattgctatgggcaagtactaacatccagtttaaaaccattgggaatgctgaagtacagcaaattgaggtgacagcttggtccccagcagagccaggactgcttcctggtctgcaggagcccatttctctccactgggccttcaaattaaatcttgaggctgggtgccgtggctcatgcctgtaatcccagcactttgggaggccaaggtgggcggatcacctgaggtcgggagtttgagaccagcctgaccaacatggagaaaccccgtctctactaaaaatacaaaattagcagggcgtggcagtgcatgcctgtaatcccagctactcaggctgaggcaggagaatcgcttgaacccgggaggtggaggttgtggtgagccgaaatcgtgccattgcactcgaacctgggcaatgagcgaaactctgtctcaaataaataaataaataagtcttgaataaagttagggatcaaatatcaatcagtggacgtattaccgccccccccccaaccaaaataaattggtgagttacaaggaagtggacacatccatgaatgttttttagtcctgtttggcatagaaatgagtttgttctcttttgcagttagaaacattgtcaatcagctgaaaataattcagaaacctagttatgctttacactccaattgtgcattattacccaacagatcagataaaaatcaagagaaagaccctgtgaaatttctccatttgttaaaattaaccatcaactgggaaaaatagaaaaaaacaaaccttttcctaaaagagacagggaggcatggtacccattctatttgctaargcactcaaggaggaaagatcatcatatgcagtagataatgtcagaaccaaaaatctagcaattctgccaggcacatagtaggaacttaaatatttgttgaacagacgccaagatgccagctagtgccctccagagattttccaggcaagttcagagatgtgctgccactgtccaatgcaagggaacagacaactgcacagaagcaaatctggtccatccatcagcggcctttcaaaacctacaatccagtgatcgctgatactcataatgatgactcataagtgttgcaatattcctgcagtaccttctgaatcatcaaagactcatcaaaattcagtgtcacttcagtactaagtacactttaccatgtgaatcactgtatttgaaggttgaccacccaagtttgataaatgtgacccctgtcctttaactggaatatagattaagcaacatttttccttctcccaactatgccagatagcagagcatctgctgctgctataaccctgtgtcgaaagagccaagcctgactttatttaagctatagagaggggtgctgaagtgaagaagatggtttatcatggtgaatggaaaagatgctacagaacaagagagtgtgtcctgacaaggaggtcagctcaaaccctggaagctgaaggggctggtgtgaggcagagttgagtcatttaataccattggcattgaaggggaaggaaggcgctaattttggatggtttgtatcagattagcaggagcatctgacttaagaaaacagagtaattattgggttttgtcaagtgaaaagtgcggtttggctttggatgccacctttgaaattttacttgaaaagtgaggagggttgaagagaacgggaaagttgagaactctggaaggtgggaagagagaattttctaaaggttttgtaatataagtagcaaacatttgtggatatatatttggagatgagagagaggaaacagtaatgaggacatgactgcccccaaaatggggagagatggaaaggactttacccaaccattttcctaccaacattaaagggataaaacatgccttctgtagggaaatggatgtcccattccatccagagggatgggtgtgcttttttttctttctttttttctttttttttttttttttttgagatggagtcttgctctgtcgcccaggctagggtgcagtggtgcaatcttggctcactgcaaccttggcctcctgggttcaagcaattctcctgcctcagcctcctgagtagctgaggttacaggcacccaccaccacgctggctaatttttgtgtttttagtagagacagggtttcaccatgttgatcaggctggtctcaaactcctgacctcaagtgatccatccacctcggcctccaaaattgtgggattacaggtgtgagccactgtgcccggccaaagtctgttattttgtagagttgattggtatttggttatcaaggctgtgctaagatttgcagcgatagaggaataaacatttatgtctgccttttaagcttctcttccaatgagctcaaatagtggttatgatattagagagaggaaatgctggctggacaaatttcctctacttttgctttagctaagatccccaagaggtgaaatatttgctgtaa

SEQ ID NO: 94044 - DNA, 387286 bp, Homo sapiens
  misc_feature (1)...(387286): n = A,T,C or G
taaattattttctcacccagtctgggggttgtgatcctgaattccttggggcggggggagacgctcagagagaaaatgcaccaggctacctgtgggggagtctgattaaagcagggggaccctgaaccccagggaatggccacagcatggagtcagcagtgccaggtgctctgatgggggcagtgcagggacactggtgacagctgaggcaagctcaccaggcacacaagaaacaagtgcagagctgtctctcactggacacttccaaaggacttgggctttttttttctaattttcaaaatatattttatttctttcttatatgtattttgcaacatttccaaggtaaacatcagcttcatatacagaaataaaagagttctttaagaactggcattgaattaatcacaagaatgatcaaattataatgggaaacaaacttgcctattaccaaagctaatgagctgaagtgaagagctgtctttacaaagctctcattgagccccctgccctgcagctgactcaagccgtcatcacatatgtacatgtataagaaaggacattggcacagtacagcagctttgcaacctccaaaagtattttggttttagttcccaggagtacatccacaggtatttggtgctttgccctattgactttgatgggtcagttttgaagtttgattaagaacacgttctcttggaatgtgctaaattttcaattaatggtactaaatatgcaaagacatgtcatatagcctctacatttctgcatcattttcaacttatacacttgaaagttttcctgtacattctcctacagcatctttgatattttttggtttccaaatagtctgcttgtcacctcctgtgtgtactgactgcggagcactgctacccctcaaaatgttaagattcccctgtgagggtttttgttttgtgctttaccctctccacagcttttgatctgattcagtaacatggttggtctatgaagagcaatgactaaaaaaaaaataataataatcagagcttaatgtgatgtagatttcaaaaaaaaaatgttaaaggttttagttgtaatttctgaaaatcatagactatcgcaaagagaagtttttattcaggttctagaatttagattttgagggtccaacagattctatcaggtgctgttgaatatcctgtatttcctagctcttcccatggtttctggttatgttccaaacttctttatattcagcaatgatagcttcaacactgagctaagttttagttttggattcagtgtgcaatccggaatgggtgaaggcagctgagaacaatcacagattctggggctctagaggcatgtttattgagggccaggatattgggtgtgggttccaccagaacaataaatctcaaagtttgctgcctggaccagcagygtcagcatcacctaggaatttgtcagaaatgcaaagtttcagggctaactcaaactacttgatcagaaactctaggatgggaccaggcaatctgttttaataaaccctccatgtgattctggtgtatgccgatgtctaagaaccattgagccactcaaaaccctagtggcttacacacaataaaagctccatttctcactgtctcagtctatcaggctgctataaaagagtcccacagactgggcagtttagaaacaacagaagagttttgaagtttagaagccactgaactgcctttgcaccttggttgaaaataaactgaccatgtgtgtgcaaggtgtttttttttttttttttttttaactgttttgttccattaacctatgtctcttgtggtcaacaccacactttcctggatatcatagctttatagcaaatcttgaactcaggtagcctcctgctgtcctatggaggtggagggagggaggatgggaagacctatgagtactgactcaaagtggagaaatgtcttaacaactctcctgcaccctgtcccccaatacagaggcctccaaatgaaggtttctgggctcaaaatgcagatataatgataagcatggctggcctggggtaaggcctgagtccttgactgcaacttccttcagagactgcagttcactgcctgtgctctacatctggtgtgagtagggcagctttcccctctaaggtctgctaggcaaagcctttacaattgccatggtcagccgtgattttggactggaactggacttctcagtttttggctgtagtaggtcctctgcatttgcatctgagttttagaataagcttgccaatttctactaaaaaacctgctggaattttcattgagacagtgttgaatctataggtcattttggagagcactggcatttaacaatactgaggcttcggatccacctacatggtatagctccacatttatttaggtcttttacatttctcttagcaatgttttgcggttttgatgtgcaggtctaacatatcttcagtcagatacaaattttaaatatttttgatgttaataaataagtagtatttttaaaattttgatttccattattttgtcttatagaaatacgatttttgcatatagattttgtagctgcaatgttgctaaaccagtattagctccagattttctgtagagaccatgacattaacctaaattatgtggtattaattaactgacaggcagcacaggtattacaggtgaaaagctggtgaccaagcccctccttttttttttcccccgccacaagacatttgataaaattgtcaactcagtaccttagcaggcagactacctgctctttgaatctgtagtagcagggaaaatggttgggagtgaatctctgggtcagtgagacagtactgccttcttcctgtctctttagcaaagtactttgagaaagatgaactcaggtaaaaactagtcattttgttaacagagctggaaggaaataaagtcatactaagatggagttctctgcctgtagtctgcaatacaaattgactgagtggtgatttcaagccttctagttctgataaagccaaaagctattacacttctgacagtgtaagataaaactgtgacccaaggcacttctcaaaggccatcagcaaagtgttctctgctggacagtggaacccagacaagcaatagaggtcatattaagggcactgccttcctaaccatgactgctgtttttgctgggtgcaagcatatagccactaagttagtaggtacaggagatatgagagagtctcgtaaataaaaatgaagagtagttaggcataagaaatatgactaattgagatctctatctgtggttatttgtaaaaggaactatacaaggaacaaacagataagaaatccattcggtatcttttaaaaattgaattgacaaagaagctattaagcctagcttgccaatgcctgtgtctatctgaccctactaaagtaacccacagtccctcaaaagcgcaccagtaagaaactggatataaaaagatgtgtagcctctcatggagcacactctttagcatgcccttcagatggaatcatagatcatgggtaagaacctcccaatgggtaaagacagtacctttggatgcaacaaaccagagttcctcctggaaaacagaactggggtctaaccaagaatttacttcattacctttgtagtctaatctgctcttcacattcgcttagacaaagaactactattttgtcctcactcttcttccaaattagttttcgtgccctacttcaccactgcatactggctgtgtggggaagagaaaggggaataaataacataatttactctgtaggtcattggaccatgaggagttatatcagacttgtaagggactgttacatctttagatcatggacgctgagctggatgcagtaactgcttagaatgctgggttttctctcttcaaacagggtgtgttctatgtgtcacaagggtatccatggatatttgaggggccagaggagtagattgtgtcacagttgtccaaagaacattcctgttttattattagaactgccaaatatccaagtattagttgtatctatagtcactccgcaagagaacctcatctcccaccttcccaagttagatgtggctgtcagatcaacagcgacattagattctcatcagaggacaaaccctatcgtgaactgtgcatgtgagggatctaggctgcacacacctcatgagaagctaactaatgcctgatgatctgaggtggaacagtttcaccccgaaaccatcccccatctccccttccccatctgtggaaaaaaactgtcttccacgaaactcgtccacggtgccaaaaaggtgggggaccgctggattagggggaatgtctgaagaaaaggaagtcctagtggtgaaaaaggcaccactgaaggcaaaaatgttcaattctttcctcaaaacaccaaagaaactaatataacttttcttgcagctattctggtaaacgaaaaacccttgtttttgaaataagatatatctgttctttaaaaatgcttattcttttataattataaaagtaacagccattggaatactcgagaacgttgtaacaatacagaacacttaaaacagtttaaagacaatgaaaagcagtagaatcccactattctgaacaaaaaaaattgcatttttttcgaattgttcagtggctgtgcaactgggagtacatgcattttcatatatactacatgtatacacgcacactgcatttgttttactttttcatttaacatcaaaattaattttttttttttgagacaaggtcttgctctgttgcccgggctggagcacagcagtgtgatcatagctcactgcagcctctacctctctggctccagcgttcctcctggtgcagcctcccaagtagttgggaccacaggtgtgcgctaccacaccaccatgcccaactacttaaataccttttttttttttttttttggtaaagatggcgtctcaaactcctggcctccagcaatcctcctgcctcagcctctcaaagtgttgggattacaggagtgagccatcatgccaagtaagttatttcttcacactaaacattcttcagctcttagttgcagagtatttctagcatgtgaaacttcatacaatcaaccacaaaacacagacaaatcagtatgtatcaaaaagaagtaactgaaaaacacaaaatattgtctttgacagaatgactattttttcagacccttaatagtgaccaggccttcgcaagcctagaagggactcctgggggtgttttcatgaaaggcctgtggaaccgacttggtatagcctcatagcaataacaaacagtttaggtatcattttgtccaggggaaatacaaattacaaaatcaaagctagagcctttttagtgttgtatgcctggcaacacacctcattctacactatagcactgctaagcctcctgccctccttacagtccagaccacatgaaaacaaagtggtaactaaatccatgcaagaagctgggtgaaagcctcctttctgtgggtgctaatctgaagttccctccctcatctgagacgacctgcccattttggcagaacatgtgttaagccaaaatctcacacagatgaactcccaagtcactcacctcgctccaaccactttacatttagtttgagaatgtcacaggaacaaatgtcatctcctatgatttgagaaacaagaataatacaacaccaccattaagtccacctacactgccttaatggtgctgttggtgccttgctcccgtattttggccgctgcaaaatgggcttaaatatgtttgtaaatacataacttaatattgaattcatcttccctattccgcgcattttgagaactgtgcttagttttcactttggacgaatagcaacccttctgatggccgtcatgacaatgtctccaataaaaactgacagtctagctggctgcaaggcaggtcctcttctatcttactgggcactgctaaactgcgaagtcggggcgacacggcagcaactttaaaatcaaaccgcatccccaagggctcggcgtgttttttggcctctgcagcttcacgtacttcgtacgacaggagcgcacttgttctctgtccgagaacttcgtcccgagagaacctcaggaactcgccgggccacaccccctgtccagggaaggaacacgcccccggtgacagccggtacggccccgggtttgggcaacctcgattacgggcggcctccagccccgccagcagcgccccgcgcccgcccgcccgcgcccctgccgccccccggttccggccgcggaccccactctctgccgttccggctgcggctccgctgccggtagcgccgtcccccgggaccacccttcggctggcgccctcccatgctctcggccacccggagggcttgccagctcctcctcctccacagcctctttcccgtcccgaggatgggcaactcggcctcgaacatcgtcagcccccaggaggccttgccgggccggaaggaacagacccctgtagcgggtaagcactggccacacggaaggcgcgggcggcgacgctgcgcatgcgcgcctttgcccggcggcagcgcgcccgctgcccggaaggaagccgtgggctggcctcgggcgggtcgcggggtgggggtctgcgcaggcgcgaaggggcgccggcagtggccggggagacgctggggtccactgacgtccctttgtctttgtttggctcgtcatcttctggagccaaactgggcattctgaaggaatctagtgcatcggtctcacttacccggagtgcataccgtcgcggccccaagttttgggcaggaaatgtgccgctggggtctggccttgctcgcgggcgcccgcggcgctgtgcctgcgccctcctttcttgtctcctctgcgccggccgccgggacccagggcacctgcagcggggctggtgcgagtgttgtcccgggaaatgccggaatgagacgagacgatgaaaaccttaagtgtggaactgcgtctcaggccagtgttctggctgaaagagtcacccctagtcacccctcgtgccctaggtcggccccgctgtccccaggggcaggggctgccgtatgctgggtcagcttaaagcgatgctccacaaacttggacaactttctagtcgttctcacatcagtactttgggaaaatacaataagggtgaaatactagaaaaatgttcacgtgcttcgatgccatgtaatggtaaactgctataaaagttttcaaaatcttggcaatttctgctgcagacagcacgcgtttcccagaacgagggccacacgttaatattaccttagtgcagcgcttctcagagtgcccccacctgccgcagcagcagcagcatcaccacctgggtgggcgttcccccattactgaatcggagrctctgggggtggagcccaacaatctctaaaacaagtcctccaggtgattgtaatgtacgctgtagcttgtaaaccactgccttagagctgttggaggattaagtgatgtttaatctacayatggctcaatgccagagaaattcagcatttaaaaaatttccttagaagtttctttttcttttccttcaagaattgttgaggataggaggaggtcatattgagagtttgtcatctcgtagaataatcagtatgagattagaaaaggtagaggttttttggattagaggcagtttaraaatygtgtgactggcttattattaatcgaattagcagtttctgtttyctggtytccccatcatttcacctgctactcagccgtaaaagtttatttttgattcaaatgcagagattgagttttgaaacaaatctagattagtaaacatctatactyatatatagatttataaaatataaccagattatctaaaacttataaatgcatcttaaaattttttctttcttttacaggcaggaatttatacgtgcatgtttaaaggcgatacttttcaaatgccagacttcctcagcttgtgctatacttcccgttcacacactgccgtgtctttgctatgccctcccatacaccaaaaaaaaaammaaaaaaaaaaamccccaaataatccaaaaactcttgttcagatttccaaactrgttcaaggtcaagatggaccaaaatttactttggctttatsttaaccaaagtcttcccaatcagtttccyaatatgtaaatgacatttttggtaaaagatgagcaaacatttcagaaatgagccaacaatttttttcttatccccatcataacttttaactgcaaaacctcaggacctggttcttttccaggctctgctgtctccatatagctgtgagtgtttttggtacaccaacacatctctgtatctgggccagtaaacttttttttttttttttggtgtagggccaagcctacaatgcatatgtccttattgttcatctrttgtaactttttccacaaaaagtgtgtgaaatttagattgtggacgttccagtctccacttctgagccttgagaggttgctgaaagccctgactggctccagaaatgggcagtgttacctcttcagtgggtttcagtagctgtaaacttgaaacttaaggatttagtattgttctgaatgtggaattcacctccactgcaacttggatcctgtttaacaactcctcccttctctatattacctccatccatgtctgttcttatttgtaccctgaccctcaaaagttgcgtgacaaaagcatcaccttttgactgcagaaggcctgtttctttagtgcgtttagataagcctagtatcaggtgtgtaccattaccaaatacttgaggtgttaaggattaccatcttagcgttcatcctaccatttttatattcttaaggacaattccacccttttacacactgtgaccaagatttccaccttgcaagaaggaaagagtcaaaccttcaaagtttttcagtgtttaatttatcccaggctacctaaaatggatsaaaacatgaacaggcctacttgggtgagtggtgaaaactgaacctgccctggactgcctcatttgcagcctgctgtgttcaggttagggggcatctgggcagtgctggctggctggtagggcacacggcaatgtgtcttgccctgtatgtggagatggtctcattgtgcttcagtgcctgaccaccaagcaatactctgagaacttgggaatgagggacaaggggaattcatacttgttgaagtgtattggtattgtattgttcaaaataggctgcaggtagaaggctcataattaaaacctcagagtgccttccattttgttaagatgtgggttccttacagtcagaactgatcttatttccggtgaattattgtaattattgtaaaagtccaatatggtttggttttgtgtcctcacstaaatctcatttcgaattgtaattcccacctgttggaggaggggcctggtgagaggtgattgaaacatgcggggggtggactttccccttgctgttctcgtgagagtgaatgaattctcacgagatctgattatttaaaagtgtgtagcttgcccctttgcgctctctcgttctctcctgctcctttgtgtggagatgtgccagcttcctyttctgccatgattgtaagtttcctgaggcctccctggccatgctttctgtacaggctgtgaaactgtgagctaattaaacctctcttctttataagttaccttgtctcaggtagttctttatagcagtgtgaaaacagactaacacaaaggccgtctttcatgtggaacttgtttttgcgtattggaaacattgctaatctgtgtttgggaatgaatcttacctttttatagagtatcagtgggatcaggtgtttgggatttggagctgtcctttaaaataactttgacaagtttgattctatcttggctttcttgcgtttacattcttagtgttcattgtatttttttgttacagtgctttttttgggcactaacatgttaaaaacagatgtagagcaccatcagaaggtattctcttttaagaactttaaatagaaaaaaacagtagaacaatgtattaatccaaaaggtggctctttgaaaaaaaattgaactacactaatgacatttgtaaacaatgaggtagtctcaagaaaaagatgaaagtacaaatatacaaaataagtcctgagaagaggagatcataaaaacagataatttgaagaatgttaggagactactgaactcttttaaaataaactttaaaactttgatgaaaatgataatttttaggaaaatataagtaatccagattgaccccagaagaggtagaaaatttaagcaggttgatttttatagaagaaataaagctatgaaagagttacctcctctcaaagcawtgtctagtttcaccaagattatctaccaaatatttaaagagcagataattccagagcaggaataaatggctatttccttgacatagcatatctatttgaacccaaaagcccattttaggcttaatgaagaaacgttgagatttccactgatgttcagaccaagacgaggagtgagaacagcctagtaccttttacagtgtgcactgttagcaaaattttggtgttatcttagttttaatcccacctttaaaaataaattctaccttttttgtattaaggaaacttccacctttttattaagtgtgatctagtcgttgatttatactttgtaagaaggtaagattcaaacctttaaacttcttaatgtttaatttctcccaggccacctaaattggattataacatgaattggcctactttgaatgatagattattattttacattgtaggtacagccagtgtgatcagacaaagcaattcgagaactacaaaagaggaaaaaagatcagaagttcttaaatacataagggaatgcagcatttgataaaggtggtatctcaagtcagtggggaaaaggtgaaatattcaataaatggtattgggacaactgggtagccatatggaaaaaaaggttggatctctacaccgtaagccaggataaatttcagtgtttgatggaataaattccagatatatgaygataatagctcacacttgttaagtgtcttgtatgccaggcactgtagtaatttactaatgcatttaatccttacggtaacccaaagaagtagtaactgttatcaccacttatagatgtggaaactgaggcccrtagatgttaggcagtttaaacaacatacattgctaatragtagtggagctgggatatgaacgtagtcagtttggctatagagttkctggccttaactcctatactctttttccatttaggttattgttaaaaatgaaacagtatgagaacagaatgtttttataatctgggtgtgaggaaagccatgacttaaccatgacttgaaaatcggaaaacgtaagactgataaattagattatatcacagtaaaaagactgataaattagatcatatcacagtaaaattcttctgcatggcaaaaatcatcataagcaaagccaaaagacaaacgatggtaaatagttgcaattcatatcataggtgaaggaccaatctttttaattatataagaagcttctagaaataaaaacaccaacatccattggcaagrtagacgttaggttatgaacagaccgtttacagaaaagtacaattggcttttaagcatataaaaagatgctcaacttcacttataatgagaatgcaaataccatttttcatgtttcagactggcagaaatccagaactttgacgatacactgtgttggtaaattcttaaggaaaaatacactcttgtacatggctggcaagagtataaattggctcaactcctatggaaggcaatttggttgtatctatcaaaaattcaaatgcatataccttttgacccaggaattcaatttatgggaatttatcgtctggacataactgctatgcatgccaaatgatgactgcaccaggttattcactacagctttgtttgcaatagcacaagactggaaacaacccaggtgcctatcagtagtggctagttacataaattacagttcattgtcacaatggatatgcagctgtaaaaaagaatgtggaacatctgtgtgaatgggtatggagggattgccaagatgtagcattaagtgaaaaaagcaaagtctcaacagtgtatatatacagtatgctaacttttctgtgaacagaagggaaaataatatgtatagagtaactttgaaaggatagctaagaaattaatggctgaggagggggctgtgtaatgaggatggatggaagacatagacttttgatgcttttttgtaacttgcttcttgtaatgtgactgcatttgtgaattamataactccactttgaagatgatctgtctcgctgtttttagtctaattgaccacctttctgtcatcttttgtcatacttacttgaagtttttttttttttcaattttgctctttcttgtcaagtacatcttttttctgcaacttgcttttgtaatcaaaatctacattttggcgtgattgaaaaatcaaaatttagagagtgaaatcggaataagttaatccaagtcattttacatttcataaatattcatttttattgaagcatcaattgtgatggcatcatttatacaaagaacagatctttgaggacaaattccttccgctattatgtagaaggcattatgtgtatttcttgtattgtgagtgatgtacgttgatttttaaaagaaaatgatagaaaacagttttccttttagaaaagttttccccaatgtgtgattaatttctaaattgtaggatacagaattgttatttcccctctttgcatcctgcccagagctctttgattttacaacctgttccagaacgtttagtgtttccctgaagtccctgggwtgagggtattctgtacctcccacaatgtgatccttacctgctttcccagtctttttctccactgtgtccctgtagaaccccatcttctgcctaatgtgtttcacttttctgcctctgtattgctcacacgaccatacccatagcgtggattgcacacttggatctttttacttagtcattcattaaatgtctattaaaggcctgcttaggaaagacctgtattgtccatatatccttatcttcaaggaagcatccttgaaatttgccctgctctaattccccttctcccggaaacccatcctttttctctccaacctaagtgatctccttcttctctactggacaaatagctatgtactactttatgaatcctttctatggcatcttgcgttgcyaattagatgtcttattgcacggaactcgcacaatctgtctcatctccccaygtagtgagctcacagcacttcaccaagagtgctgcccaccaagaactcacagcacttcaccaagagtgcagtcaatagtsttttatgaacgttgggaagaatatggttaatgcctgagaacaaagaccagaaatgtcatcttttcgtgtgaccatcatgatacagagaagttaacagagctgccccattgtccatggggcatgttcygagtttttccagtagtggtgatagattttggctgatttctctgaacttttccctgagttatttttgtgactttggccaggatgaagggtggggaacccctcatctttaaatctctgagcagagacttgctaggcatctgcagcagtggtggggaagaggtcattaagctcagtgcagtccacgtggggccttggcctgcgatcttcaggctcaggasttattgtgagcccctgcgttgggtgggggaagggaggaaaggaggacagctgaggcaaggagtgggagcctggctgggggaggagacatcagcctggggcatgggtcttatgagggtgagtggccgccaggccctcagcaaggaccagagtggaagcctctttgctaagcttggtctggctcctgcatgggtcccagcagcgtgccatcaatcatccgttcctccttggcagatggccagrctccttcccatgcagcagcagcagcagctggctggccctgccctcctgtttcagctgacatcggcaaccctctggggatgtatggaagactgaattctacaagagatgctttcaggatgtcagtgcatgatgaatgaaagttgtggatcttctacatgctgctcttatcttcctcacatcataaactccaagtttgagagcatcacaatattcatcgatatgtagcactacacaatgaactgagggcaggaattgacttactctttgtacccggaacacagtaagctgatgataaatacttgttgaaagactgtagcatataacctgttgagttgtttgagaggccagggttcctctgagcagtrtcatgccaacagacacacgcatgttatgtattatggcacataatcggtaagtccataactgttggagtaatggggacgagcayagtgcactgaagggtacaggaagcatcggggtttgggggctccggcctacatttgtggttatgttactggtttttcctatcgcatcagaaaactttattaactagatggaatttctgcagccagatgaaaaygtatgtgataggagtggatcgtgtgataggagtggatcgtgttagctgcgtgagattgctagtgaggcactgagttgtcatcaggtagcaattccaccatttccactggaattccttagcacattttaagctaaaagaggtaagaagtcagaagggtaagagtctggccatggctttgctttcttctctcacgcttccaaccaccctcgtctgaaagctacatttcaccttgtgaaagttctgcccttctgtttccaaatacragatgctgtaagcctgaactcagatctaaaaccaaacttagcattttgtttccaaaagattgactacatattttaatttcccaacctctctcagtggcactgctctcctctcaaatcccagaagccgcagtcagggtcatctttgagccttacctctacatttgagttgtccttcctcccatgagycccgatgacttcttttcttcattggtctctgatctgtcttcactctcccctgcctgagctgttcagagcattatcaacatctacctaaaatttgaatttcattctctcrctgtttagggaacagcagcgacttggacctgtccartgacactcttcaatgctggacacttgctgtaatttgctgctggcctcagtgtttcagatctccacttccaccccgaggctggctcctgctctgagctccttccttgcaggttgctatggtctgaatgcctrtgtgcccctactgaattcatgttgaaatcctcacccccccaggtgatgggggattakgaggtgggggctttgggaggtgattagtcatgagggtggaacacgcatgagtgggattagtgcccttrtaaaagagaccccagataactagctagtcttttcggccatgtgaggacatggtgagaaggcgctgtccgtgaaccagaatttgggctctcaccagacactgaacctgctagcgctttgatcttggacttccagtctccagtattgtgagaaagaagctcctattattgataagctgccaggttatggtaaattgttatagcagtctggcggactgagacacaggatgttttttccttgcagccctgtctaaaacatcttggggctttcaaggctaaacttggcttcttccacttctctgccgccccttggggctgtttcagcttagattgctcttagagttggagctggaactagggctttggggctctgttttgtgctttcattccagtgtctctccttggggagatgaaggtagaatccctttcctgtatttggtgcttggtggtagtcatttcccccgctgtgttttcggaactcctagcctggttatagaagctgctggcatgatcaragttctcagattccagctgctttctcctggatatcctatcaaaatgccctctccgttcagtgagatactcgatgactttgactcatgatgccaaatgattgatttttccttcaccagagacctgcgtgtcctctgggtcagctggtacctcttctgtaagctcgggctcttatgaaaggggacataggcttttgcccawtttttttttttttaaaggcatggtttcttgtatttctgtaggaattttgtatcctttcatggaagtgcatctgtagtgtttctcagcagggtatattcctaatccactaacttgttgaacaagtatattaaattggcatcatgatacagcgaaggctagtaataatgaaacaggaagaaatgtggtgacagtatatttagatgattataaatacattaaaatacaaaatttaggaacatcggatgtcttcccagagcatgtttataaaatgaattctttcaaagatgttaccataggaaagtaatactagtgttgaattttcctttaaaaagttttcgtattttacctttgatttaaaaaaattagtttaccattaggtattttatactttgcataggtcaaaagtcatgtgyaaaattaaaaagcatggttcagatgaggccacaaattattctttggcctgctgaaaagatctgatattttaacagattgtacccagaagggaagagtcatgaaaatgaaatactttgagggaattcatagctttccasgtggggaaaatgagacctgaagtaaaaaattttgaatgcactgttgttagcagttgaaaaccgcgtaagagtttgcagaatggaatggtaggctgtcacagagcccccgagaaggcattgcattgctgaaaactccattgccttacctcttcctgagaggcagtttacaaagagccacctcatctaccagtgagccctctgcagggacttctgctggtccctggggtgtctggcttaccattcagcattcctcacaccccgagatgtgtgcatcagcatgaaggagtgcttctcagagccccagggtgtccaggtggtcctgataacagagggcactcaggcagtctgtccctgctagccccatgcaggttgctgggaaagcacctgacaccaggagtagaaacttcacctggtggcccatcctcagaatgtaagaggggtttcaggagcccactctagataacttaaaaaatgttttttttcttcaggcttatgctcatactaacaagctctgtcgaattatttcaatgtgcggaataaaaggcaagaattattttctggtgcagtttagaccttggatgagtagggttatgcagctgtttgctgcagtagttttggggagacacacacctgacttaagctatgtgaatttggatatgaagttccaagtgtaagatatgaaccaaaggatttctcttaacgtaacgatggaactcaagcctgaactatttttgttcattaacaacctggcagttattttttcagaataaggagatttatgaaagagctgaagtctgggcttcattttgcgtgtacatttgcttccgctgttgccggatggttggtaaaggaaattgatagagtttttaaagtgaggactgtattgtttactttatgtgttgttttaaagtaggaaggaacacagtcgccctgctatcagcctctggtttcttgtsccagtggcgctaagagtcaactcttctgcctgacagtgcctgctcctaccgtgcctgtgctgagatagctcctcctggcttcagggcctttatggctgaaacttcaattatatatataaaatatataaaataattattaatataacttaatataataatatataataacttttttgagacggagtcttgctctgtcggccaggctggagtgcagtggcatgatctcggctcactgcaccctccgtctcccggattcaagcgattctccatacctcagcctcttgagtagctgggattacaggcgcccagcagggtttccccatgttgkccaggctggtcttgaactcctgacctcaggagatccacctgccttggcctcccagagtgctgggattacaggcgtgagcccctctgcccggccaactttgtatttttgctcaaagtttgatctgtacattttgaatcatttttatcctttttccaatttcccarctaaccaatgttcagacccgagaaagcattctccraaacctttctctgtattcataaaatcatacacacacacgcacaattgttggttttttataaaaatggaccagattgtattttctgtatcttgcttttcttgcttaatagtacatcataatatctccagttcagctgatatatctgtttttctttttttgagacggagtttcactgttgttacccatgctggagtgcaatggcgcgatctctgctcactgcaacctctgcctcccagcttcaagtgattgttctgcctcagccttccgagtagatgggattacaggcatccgtcaccagacctagctatttttttgtatttttagtagagactggtttctaccatgttggccgggctggtctcgaactcctgacctcaggtgatccgcctacctcaccctcccaaagtgctgggattacaggtgtgagctgctgcacctggctcagctggtatatctttagtatgttcttttatcttaaatgacttttttttttttttcgagcagttttaggtttacagaaaaattgagtggaaagtacagagttcccatacacactcctccctgagtttcccctgttaacgtcttgctttagttacaattgatgagccaatatasatacattattattaactaaagtctgtagtttacattagagttcatttttgctatcatccagtctgtgggttttgacagatgcatgatgatatgtacctaccattgcagtatcagaacagaatgccttcactgccttaaaagtcctctgtgctttacctatttgtccatctcccccttcccaagaaccccttgcaaccactgaactttttttattgtctccatagtctttgctttttccagaatgtcrtatatttggaattatatagtatatagccttttcrgttggcttctttcacttaacaatatgatttgaggarccttcatgtcttttcctggttggatagccaaatttctttttattatcaataatattccattgtatggatgtaccacagttgatccattcacctactgaataaatatgtkcatcacttacatggggatctataattgttttggcagttatgaataaagcctctattaaaatttttattcaagtttttgtgtggtcataagttttcaactcatttgggtaaatgcccaaaagtgtgatttctgggttgtatggtatatgtagttccataacaaactgccaaattgtcttctgtaccattttgcattgccaccagcaataaatgagggttcctcttgctcsacatccttcccggcagttgttgttatcagtgctttggattttagctattccacagacatttagtgggatctcattgttttaatttgcaattcccaaatgatatatgctgatgaagatctttcctgagcttatttgccatattatgttttctttggtgatgtgtctgttcaaatcttttgcccatatttcagttgggttgttttcttactgagttttttttttttttttttttttttttggagacagtcttacactattgcccaggctggagtgcagtggtgcgatcttggctcaccacaacctctgcctcccaggcccgagtgatactcatgcgtcagcttcctgggtagctgggactacaggcatgtgccaccatgcctgactgatttttggatttttagtagacatggggtttcgctgtgtttgccaggctgatgtcgaacttttgacctcaagcagactgcccgccttggtctctcaaagtgctgagattacaggtgtgagccaccatgagtggcctattgttgagttttaagagctctttgtatattttggatatcctttatcagatgtgtcttttccaattttttcccagcctgtggcttgtcttcttatcttcttgacagtatctttgggaaaggagaagtttttaatttaaatgacatccagcttgtggaccatttctttcatggattgtgcctttcgtgtatctaaaaagttattgccaaaccgaaggtcacctagattttctcctgtgttatcttctaggatttgtatagctttgcatttagctatgtgatccattccaagttgatttttgtgaaggttgtaaggtctgtgtctagatttatttttgcctgtgggtgtccagttggtcaagcccattagttgaaatgactgtcttttctccatcgtattgcctttgctcatttgtcaaagatgagttgaccatatttatgtgggtctatttctgggctccttattatgatccatttgtcagaatagacaaatgtcttttcttttgctgattgttgaagttgagtagcatcggttctctgactttgttcttctcctttaatattgagttagctattctttttttccccctttccatataaagtttagaatcagtttgttaatattcacaaataacttgctgggattttgattgcaatgatagggttgcactgaatctccagatcaagttgggaagaactgacatcttgaaaatattgaatctacctatttgtgcacatggactatctctccatttatttagatatatttctttcatcagatttttagtcttgttcttagggatcttgcacatattttattaataccaaaatatttcgtgtttttttgatgttgatgtaaatggtcttgtttgtgatttcaaattccagttgttcgttgctggtataggaaggcaataattgactttcgtatattaatcttgtaacctgcacccttgctgtaatttcttattagttccaggatgttttctggattttctacatagacagtcatgtcatctgtgaatgaacagttttatttcttccttcccaatctgtacaccttttatttctttttcttgtcttaccacattagctaggacttctagtatgatgctgaataggagtagtaatagtggacatctttgcattgttccagaacttagtgggaaagcatctagtttctacttttaggtatgatattagctctggatttttaaaaatagatgtttgtcctcgtccattcgtgttgtgataacagaataccacagaactgggtaatttataaagaaacgtattttctcacagctccggaggctggcaagtccatgatcaccgtcaacatgtcagcaagttcagttgtctgctgaaggctgttctctgcttcaaagatggttcctctggattggagaaacagtgtgtcctcacatggcagaagaacagaaaagtgagctagctgaatgctctgtgaagcctcctttataagggctttattctcatccatgagggatgagccctcatgacctaatcacctcttaagggtacctcctcttagtaccatcacactgggaattcaatttcaacacctgaattttggaggggacacattcaaaccaaagtgatgttctttatcaggttaaagaagttctctactcttagtctgctgagagttaatatgttctttttaatggctgcatgaagttccatggtatatatgcacatagtttattaaaatgaaacatgacaaaaccacaccctctttaacgttgaaatattgatatgtttgttaatcacagcacgtggtatgtatatggtaagtgcttacgggtacctccctgttaaatcttgccaaggatataaaattggtgccaggttatgtaatgcttttgaagccaacttgagtcttggatcagactggaaaatggaaagaatgtagattctgtgatgatgaatactttggggaaaataagaggattaggtagctgatgcccacctttctatcaagggagcaaaaatgtcctatgggtctttgatctttgccagtgcatttggattggtttctaagtacagcgtggcagccgggttatggtattgttagttctggaaayttagtcaatttgcatctggagtcacctagtcacatttgatgaaatgggttacaaagttttagcacctttctgtaaaccaggggttggcaaataatagcccacaggccaagtgtgacctgctattttttcaattaagttttaaattttgagataatgttagatttacatgcagtagttagaagtaatacaaactgttgtactctgtggatctgttgtactctttgcctggtttcctcagtggtacatcttgcaaaactatagtacgtcattacaacgaggatattgacaatgacagagtcaatatacagaacagttctgccaccagagattccttgtgctgcatttttatagccacattgaccttcttcctcaccccctgcccatgtgcaacctctggcgaccactcctgttctccattgctgttatttcatcatttcaaggattttacataaacgatgtcatatagtatgtaacctcttgggattggcttttttcagtcagcacaattccctgagattcaccccagttggttaatgtaccagtgctttgttctttttcattacagagtattattacttggtgtggatgtaccacagtttaaccattcacacattgaaggatatctagattgtttccagtctttggctgttacgagtgaagctgctatgaacattcatgtccaggtttttgtgtgaacataagttttcatttatctggagtaagtgcccaggagtgcaattgctgggcacttacatgtgataattgcatgtttagtttcataagaaactgccaaactgtttcccagagttcttcagtttgatattcccaccagcaacatatgaaggatctgatttctctgcatcctctctagcatttggtggtagtgtcactgttttattttagccattctgatagctatgtagtgatatctcatcatggttttactttttatttcgttggtggataaggatgttgaagatcttttaatgtgcttgtttgtcatttgtatatcctctttcgttaaatgtctttggtagacgttaaacatttctaattgaattattgctttactcttcagcggagtcttttatatattctcattactagttttctgttagatatgtggtttgtaaatattttcttctaggctgtagcttgccttttaattttcttttttttttttttttcttaagacttgtacagagtaaaagtttttaattctgatgagttccagcttcctaatttttcctttcatggatcatgttttcatgtcaagtctaagaactctttgccttgcgttgatcctggagattttttcctatgctttttgttttccttaaagttctgtagttttacattttatatttaagtctgtgatccattttgagataatttttgtttcaggttgaggttgatgtttagtttgaggttcatttgtgtcaaacagaactctgtgtactggtgttcagttccaagggaaggctggcactccatggaggttagcaaaaaccatcattatgccaaccatcaggaatacgatccagacacttgtgcccgctgtatctcagtacgagagtctccaaggaaaacacaacacagtcaggtagtcgagggagcaatagttacacagagaagagacagagcaagatcagtttcagtagtgcgtatgggtcccctgtgtccaggggtccctcgtggctgcccgtacggggtggtctgcctacgagcacccctyttgtactgcaactaagggaccctgtttcctgggtggggaacagatagagcaatgaggttggccaggtgccatgtgacacacacccttaagcagaacaaaggcgcacacatgagcttgcagcagtgagagatacgtattccacacaaggcataagcctgccacaggtgatgagggctcttcatctgttggtgagatgtgtttcaggcccagggcccattcttaggccactgagtgggggctgaaaggctgtgcacacaagactccctttcgcaacattttttttttttttgtctatggatgaatattcagttactacagaataatttgttgaaatcctttctccattgatttgcttctgcatttttgtccaaaattagttggccatatttgtgtgggtctgtttctgggtccttactccctcccgttgatctatgggtctccctctgtgacattgtcatgctgtcttggttatgatggttatatcgcaggccttaatattagagtcatccctcccaccttattcttccctttcaagattgttttagctgttctaaggtctgtcccactccatataaacatccaaataaacatcagaataaactctctgtcaacagaaaaaccttgctaggattttgataggaattgcatttagggacaattgatgtctttattatgctgagtctttcaatccatgagcacagcatgtctttccatttatttaagttgccttcaacttctttcatcagcgttttgtaattctcagtgtatagatcttgtgcatgtttgctatgttcatacctaacctaagcttttcattttctttggagtgattgtaaatgatatggtatctttaattttggtttccacctgttcattgatagtatttaaaaatgcagttgattttgggatgttgatcttacatctttcaaccttgctgaactcactttagtagaagttttctcatagactttttcagatattctacatagataaccctatcacctggaagtagagttttaatctgtgtgccttttgtttttcttgccttatttcagtggctagaacttccagtattatgttaaataaaagtagtgatctgtggatatttccctagccttaaaaaaaaagtattgagagcagacatgcttactttgtatctatcttaggggaaaagcattcagcctttcactaaactatcacatatgatgtcagctgtaggcttttttgcagatgctgtttattgagttacggtagttcctctttattcctaacttcctcagtgtttttatcaggaaaagkgtcttctaccacctgtttaaataaagttttattggaacacaggcatgcttattgctttagctgttttctgtgtctgcgttctcagtgtaacaccagaatcgagtagttgtgatagtgaccatatgaccctcaaaacctaaaatatttattatctggaattttacagaaaaggtttgctgaatcttactatagtttcaccaactttttcttttgaattgtccttttttctttctttttttccaagttcttcctatctcttgatattctaccatggttgcaaactcttactccacacactcttactctaattggctaagacctagagcttgagccattggctgcggccagcctcagaagaaagcagggaggatggatagatgtagatctagttgccttctaaaggcactttctactctttgtctgtatttctatcaacggtagcatttggggtagttctaacatgttcttttgataacttctattaattctgtagcttgacagttaccctgaacaaattactttcatttcacttcttcttgacctcaaccttytttcctgccttgattctctgactsttcctatagtttgtattgctgtgtttccttatgatggaaagatacatgacttcactgatctctaagggatctaggggagtgttgctttctatacgtgacagttcttcactttttagttacatagttccattttgttttgtctaagggaggtgcttttttttttttttttttttttttttttttttttttttttattaaatggagtctcgctctgtcccccaggctggagtgcagtggtgcgatctgggctcactgcaagctctgcctccagggttcataccattttcctgccttatcctcccgagtacctgggactacatgcacccgccaccatgcccagctaattttttgtatttttagtagagatggggtttcaccgtgttagccaggatggtcttgatctcctgacctcgtgatctgcctgcctcggcctcccaaagtgctgggattacaggtgtgagctgccgcacccagcctgtctaagggagttttaaaatgtttagctttgaaaagtttgttgctttcgctgaaaagagtgggatgaagtatgacctgagtctctragttaggaaataagtgaataagtttttttgatcactgaaaggtaaaccactgtggtattgtgtttattgattattaattgatagagatattatgtcctgcatctctacattcacatttgattattttccagcttgcttgatctctccccagaacatggctttattgataatacaccccttcttcttcttttcttttcttttcttttttttgacacagtcttgctctgttgctgaggctggagtgcagtagtacgacgcctcctcacagcaacctctgcctcctgggttcaagtgattcttctgcctcagcctcccaagtagctgaggttacaggcacctaccaccatgcctggctaatttttagagattacccagagacgggggttcaccgtgttggccaggctggtcttgaactcctgacctcaagtgatctgcctgtctcggcctcccgaagtgctgggattacakgtgtgagccaccacgcccggcmccctgtacttcttttttctctttgccatgcttctgtttacccattactgccaacccatttgaccctccttgcttaggaattgctagcatttattttctttactactcatttggtatgcattcatattatttgaagacttcatatattgtctttttatttaagtttataatagtgattattgtatttctgttttctstataatggcattgcaaatttaatgagagcttatttacttatgtggatccctcccacacctaggcatgtctgttacatgatgaccattagttaaatgaactaaagaatgattgagcttatattctgtagtatcgtatttggaagttgtgtgttcaataaaactcttttagtataattcaggccaataggtattaatattaatgaatgtcagtaaatggaagctatgtttttaccttctagcacaaacatctttagaaattttattacgactgtgtatgtgtgtccagtggctgactttccaagcagttattagaggagatctgagtttttagcttctgcattatgattcatgttgaatatttatggaagagawgygtttctacaaatatgtaaaaatattggtgagtgaaagaaatggctcccagtatgacagaagaaaatatcctaaagagatccacagttatctgcagtttccccaaggttgtgtttacataaaaaagacattgttttatgttctagcatcaagagatgattttacgatataacaagttccacaaagaactctcgtaagrtggttctcagtcccggcataactgctacggagatcacagagcaatattattctctggatttattgggtttgctgcattctgttagcatcattcatatttttctcccatgggtaccactttcctctcttttyctaataccaagatatggagactcatttatgccgtggagtgtgatgctgggaaatgaatgcttgcttattacctctctccacaggacctttcatgaccatacgtcgatgtctgccgcctcagtataaataggcacattcagaaatgtgttctctagtgaaggrcatgttggcttggtggaaagcacagggacttcacgtctggactgcgagtcagagctgtgcgtcatgtgcttaactggctgtgtgaccttggataaatttgcctcagttttctcatttgtaaaacagacagtcgctatttctgggaatagatgagataataaggaaagaacctagaatggtacctggctcctgccagttgcacagaatgtttgttttgcagtgtgatgcgtccagtagggacacttaggggacagtgtactgtcatrctgttgccctgttttgtaagagtgactgatggctacgtgacatcaccacactccctgcaagagctgcggtgtatggcacgtggctaagctgtaggtgcacatggccttcaactccacctgagctccagccttctttttgggagaactggcctctgggtccacctatgaagcaggaaggttgattattacttaaacccatagtcttataacctcttgggaaaagattctctcaaaatgactcttgatggtcaacatgggtgtgcatttacgcagcttycattcccatcgcttcttgcaggcagtgttgttcctgattgccccagtctagtttatcgcaagggaatttctttgcggggcagtgagctcccttttggcagaagaaagagtcaagcagaggctgggaggttcccttacccacagtggtggctggctctgtagtgcctcccggctctgggttctactttcctagtctcctgcctttccgcaagtgtctccacccagctccgatagagtgggtagcatcaggagaagggagggcagggatgagtgttgtagcatctcaacatttaagagcagaggayggggggctggggaagagcatacactggggccgggtgtgaggagggagaacattagaaaaaaaaagctaatgcctgctgggcttaatacgtaggtaatgggttgataggtaaatgtgtgccatggtggtttgctgcacctatgtaataaacctgcacatcctgcacatgtacctcagaacttaaaaaaaaaaaaaaaaaagagcagaggacaaggagcctccaagtttatgtggaaaaagtagttagaaaagcaaaaagagtactcaggaaaccaagagaaatgagaacatcaggaagaaatggatggtcggccacagccattgcatttgacaaccaaaagcttttgccaacaatgatgggcaaagagagggagggcgagagccaggcaccatggccaggtgggaaagtgtggagacctgcagatcctggcttctctttcaacagcttggctggaaataaggcaacaggttcaaaaggggtagggtttttaaagatgggagagactcaaaaatgtgtgtattctaaagggggaagatatgggaagatgttgaagaaaatctaaattttgtactactgtttgtcattttatacatggattctttttcactaccktctccttttttttttttttttttttttaaatgagacagagtctcactatgttgcccaggctggtcttcaactcatgagctcaagtgaccctccctcctgagtctctctgagtgttggaattacagccatgagtccccaggactggaccccttttgttttttattcctagttacttttctgctctttttcctctcagcctccctcactcttccctccctcgctcgctttctgaggcttctgacaactcatctattaataagtttcttacagtcctgtccttctggaagccctcagtgccacatggaatctggacctggcaatttcttgctatccatttaggaggagactgttggtgtccattggtcccatttactcatccccggccatgtgttagctgtctgtaattctgtacgttgttgctacagtatttatatatgtcaagatgtatctcacagcatcttattcaccctaatattagtgaaaatattcactaatattttcagttttgtgcttaattccttgaaggttttgggatttaagcccaaccaatttctgygaagagcagtagcataggaaattaaacacaaaaaataaaagtttaatttagaactgccctaaagccaaattgggaaaatttagtcactgttttccggtaagtacacagyaacaggtgttttggatggggagaggtgagcactataaagatgtctctgcagttctgaaatttccttttctgctttttctttccctcttcttcctcctctttaccctcctcctccttccctactcagccagtttgctatcgagtgtaatacccatggtagagaccaggatggaagctgaaacgtgagagaggtgtgtatgaatggttggtttgggtgtatgttcacattcatgcgtggagctcagtgtgatggaggtgggtcctgtaggctcactggggacccttggcgcagccccgttcacatggttgctgtggtgctggactggccactgggactctgccctcaggcaccagtgacccctggggtgggtcatctgaccctttctggacagcgtctgcttcctgcagcttgtgtgcctgttttccagagatgggagctgtaaaytgtgaaagtstagggctggcagctgccacggtgctgcaccctgcagaagatctgctttcagcaggagaggctgaggcccacgggaggaggcagaaatggtagctggtcccargctccttagctataaccatttttctgcccttcccatggcttcagtcttcagcgtttccttggattctttgaccaaaaacaaccagtctatctccctgtttctctttgcctctctttccttaaggcagtccaagttggaatattttcacctgcagctgaattaacatggatgccttccttatccttaacaaggtttgtcttgaatggaaaataaatggggatcacatttggagccagtggtccctcgctagcttttcatgtgagccacacttagaagcygtgctagggccgcaggcgtgctggacattcgtgttgttccagtattcaccgctgtgtgctggcaggatcctacctggaggttctggggactgcttccccatcccgcagagtttagcgttgcccgcaggctcataggtgtcaagaaccaggtgagagatagcacctggctcagcatatgatgtggtacttttttctttttttttaggcagggtctcactttgtgggccaggctggagtgcagtggcaggatcttggcttactgcagcctygacatcctgggcttaggtgatcctcccatctcagcctcccacatagctgggactaacaggcatgtgccaccatgcctggctaagtattttttgtagagacagggtttcgccatgttgcccaggcttgtctcgaactcgtgggctcaagcaatctgccttcctaggcctcccaaagtgctggacttacaggtgtgagccaccacacccgaccatgtttgttctagaaaaataaagctcattaattacaggaacatcgcagcttactgcctttctcactagcagccatgacgtgagctcctggtagaaatgaatagctcccttattaaaactgactggtcttaagtgtcacatcatgaagctttggatctctttccttccccgcagtgtccctccccgcacaacataaggaaaacctttcttagtccttcatatttggtgcttgggtgctaagcattacagcgctcttggctatccagtcatgcccataagccacaaagtgtttccctgtcaactgggcttcttctcttatcagagccaaggtgagaagccactgtggcccctgagagtgggctcaggaattctcggttttggcttgctattaatttgctgtgcagctttgagctatttacctaacttctctgttcataaatttgctacttatgaaaagtgcttgaaagcgaagttcctagaggctcttttttcctcctgacctgcggtaattttaagtgctttcttgtgttacgcttagcactttctctcttcccgtcaaaattaatctcctttcctcagaagctgatgaattagaactctaagccacgcttctttcttgcatggtctcacttgcttttctcccccatctttttctctgttctttttccccttgaggcaaaggcagagaaagaagatggaggcctagcagacgggttgctaatacagttacgacattctctttctcagtctaggggaagttactctggcaattatgaatccatatccctgcctaggaactaactttatcccccttattagtatttcatttctatgggatggcttcttgcagattttttttaaatcttttttttttttttcctgaaatttcttacagagaccaaccctgttttcactatctgaatatttgaaagtatagttgaaactcaggcagtttggaaggagaaccgtgctgtggtttcctccaggagccgaggttctttccacaggactgcacatgggccttgtgctttgtggactgtcagttctgtgtcagcctgcagctgtctctttttaattttgttgtgttttttagagaaggtctcactctggagtggaggctagagtgcagtagcacagtcccagcttactgcagccttgaacttctgggctcacgcaatcctcccaactcagcctccttagtggctgggactgcaggcatgcgttaccatgcctggctaattttttttttttttttttaatttctagtagagatgaggtctcgctatgttgccgaggctagtcttgagttcctgggctcaagcgatcctcctgcctcggcctcccaaagtgctgggattataggtgtgagccaccgtgcctggccttggcagcctcatcttgagtgtgaaatttgtttacagcttttcttgctaaagactagtgtttcttaattaccatgtgcaaggtcttccataccgcagaaggctgttgggcaaggcatagtccagataaactgtcttgacagagaagtagcaaacgggaaacaggctgaggttggatgctagggagatgcctgggcaggatgtcacaacatggattaaaatggaggcagggcagggcagggccacaggccaagccaacacagcaggcctgtctgggctgcacacgtggtccagttggagggccatccacagcaacagcaggaaggggttgatcaggaggcatcatataagaactaggcggatggggcagtggctgattccacgtggaggggcctgctctgaggctgctggtgttcctttggtggtcagaacctggcatcccatagctgacttctataacccacgtgccatttgggcctcctgctccttggcttagtccctagttcgttaccatgggaacgtgaagctatccttaatatttctctaaattctggagtgtgtgtgtgactcggggagtttgtgttctcatgattacttccgcctcaaggttcgggcatctccagatgctacctctttttcacactgaattgactccttttcatttattttttgagttggagtcttrctctgtcwcccaggctggagtgcagtggcgtgatctcagttcactgcaacctccgcctcccgggttgaagcagttctcctgtcttggtctcccgagtaggtggacttataggcgcccacaacgacgcctgacaaatctttgtatttttagtagagacggggtttcaccatattggccagactggtctcaaactcctgacctcaggtgatctgcctgcctcggcctcccaaagtcccgggagatgggattacaggtgtgagccmctacgcctggccaatgtaaaggaaattgagggggtacccagattcgaagcggggacctcttgatctgcagtcaaatgttctaccccgaattctaccccctctgctgactcttgtctcattttctatcaaaacctcatccatggctttggtggctcatgcctgtgtcccagcgctgtgagggccaaggcaagaggactgcttgaagctcagagtttgagactagactggacaacaaagtgagacccccaacagtacaaaaatatattatgcaatttccttggtgtggtggtgtgcacccgtagtcccagctacttaggaggctgaggcaggaagattgcttgagcacaggaggtcaagactgagtgagctgtgatggtgccrctatactccagtctgggtggtagtgtgaaaccctgctgctaaaaaatgaaaaagccaaacaaacgaaacaaaacaaaccctacaaaacctgacccataacacaggtgagaatgtcctagactttcctgaagactggggaaggagtgatgggggaggggccacactgcacacatcacggaagggggacctctaaccctggttattcctgctgccaaggcagcctcatttcacagcttctccctgcttgagggcgaagctgtccaccttccttcccagccctccttcctttcgccctcctaagaaaacatacgtcatcttttctcccacaaaacagatggagcacttctttttggcgtgggttctggctaacatccgtgcactaagggtctcatctgttacttccaaatcctaccaagttgttttctcaagcaaagatgggactttttgaacactgacctcgcattaaattgtgtaaccttggaggttggactacatgtcgaaccaaacaggcaagaggaagtggtgaccgggcttgaggggtccctctctgtgatctccattccggtgtgctgtgaccccctttgcccatcacacggttgtgtggttgtgttttattccacccgctcctcgtgtgaagggggcactgtgttcactctatcaccttatccctggagcacccaccaaagtgccgtgaacagagtaggaattcaatcaatatttaccgaacgactagatgtgctcagcacggtgctaatggatgattagaaaagttaataatctcagctcttaaggagtttatagtctaktcaggaagccaaaaataacacagatgagaataattaagcctccaatctgatggcactgactgggggtgcatttatcaagaatttggaagcacgtaaccatacttacattctttgttgcatacatagcatttaaattgtgactctcatccaacttatcactcagatacatttttttctgtgttaaaaatataaagccatatttccagagattttyaaagggcccaaaagattatgaatttgatcttaacatcagcagatgacaatctagttttaacaagttactttgaattagtcaaatctaaaactcactttagatttgttttctggctaatattctaattgagagacatttccatggaggtattaggttaaaatactgtttttagatatgtgacacatttccctgtattttagaaatctcttgggtatcttaagagaaatttaatccatctgattttgatccaaatataatttactcacaatgatggagaaatatttgatatccacggaaatctattgatgcacttaaagtttttctcyagggaaataagaaatcacattttttcaagggtgaatcataaacctacagtgtctaatttttctgcttatttaacaaaacctgagttaagtatcaaattgggcagttccagatcatttgtttttaagttttttagtcttttaaactatgcagagraaattttattcaaagaggtttttttttccttattctgacagttttatctgctatcctgtttttttccctaaacagtgatttttgaagatttaaggtaataacacaattttgatgtctgtggattaatggcgtctgtattcacgatgtttcagacctgtcagagcttggaaatarcatttaaatgtattgsttaattttaattttaaaatactttctctragaattagatcccagtcctaagtgagtactttgaatttcaaagaggggatttaggccaaggtacagctaaattttgtcctcttgaaagacctgaaatccatttacaaataaaattgaggtcttcgtatcaatattatgttttggaagtgaaatgtgcaaggacttgtgcagtgtcacatcttaagaggctgttgggtgccatcgggagtcgaggcagggcctggcatttcagcgaccctgctgctccacatgctggttatggagtactctccgacttgtccacgcttccaagttctgatttctggcctcctgaggatggtggttttcctagcgcttctctttcacagtaggttttgcatttctgacctgggccttagcctctttctttaaggtttgccttctggccagatccctgggcaggggcccagctcctgctttgcggccctctgctgcctgcagctaatgacagtgacccctgcccggctccactgactcataggatctgatgcttggatcgttgtaatagtcttctggtctcttcttcttttagttcatcaaacagatcttaaccatgtaaaccttcgtaaatattatttcatgtggggattggctcaattttagcgggtgggtatacaaactggagacagactacctgggtttagtcccaaccctgaaatttattactctatgatcttgggcaagttacatgaccttggtcaagctagttaaggtctctgtgccttagtttcctagggtgaaaaatggggttgatgataccctgatgagaggtaggtattattttatgaagattaaatgacacagaaggagaagcgtttagaacactgtgtggctatagtaagtgctaaataaaattagttattacatagattgccctatccttttagaattttctgttttagaattttagaatgtttttaatcttcagtacttgctatcgtcttttttaatagaaataagtctcgagtttagaggtagttataggctttgcgaattgagtaacattcttttattttttaaaaaatttattttttcagatgaagctggttcccctttatatttaatacaaaatttcctttaaaaatctaggttaaaaagaagtgagtttaaaacatatcaactaaatcataaataaatcgtactatggttttaaatatggcaaaaatcgtgaacacagtgctcaaatgcctgaagtttgaggaaaatctgtgaggggtgggtgcttcgggcctctggtaggtcttagctagcctggggctcttcctgccctcctgtgggcctctgttttagccagacagcccactgatgactgccacatcctgagcattcctgcctttgggtttgttcttgagaatacccaccctattccacgtttctgatttccactcatcctcatggccccatttgagatgaacatcatctgtaaggcctccccagtgcctggctccaggcctctcttcttcctccaaactttgtcgtgctcaagaaagtgcctattstgtgtatttggcagtcrtttcttgccacgtgatatctaataacttccatggatctgtcctgtttctgcaactggaagaagatgagcrgaacctcttttaggtggggacagtgtcttagtcatctcaatagccccttgaaggcatgatacggtaccttggatggtttctatgttaatattttctgttatgtgtccatattgaggtatcatttatgtaccacaaaattcacctcttctaaagtagtggaatttgctttttaacaagtttgtacagttgtgaaaccatcaatgctgtccagttttagaacactgtcatcacccccaaaagttgtctcctgcctctttgcagtcagtctgctcacctgcctccagctaacaattgatctgctttctgtctccatagttatctttttaaagataaatttcatagaaaaggaatcatccaacatgtagtcttctctgtatgggcttttccacctagcatagtgttcctgtggttcttccatgttgttgcacttactagtaattgtttcattttattccttagtggcagcagatagaccttgctgctgggtgttcagattgtttccagttttgaggtattatgaataattcttccatgaatgtacaggtctttttgtgagcccatgtcttcatttctcatggatagattttggagtagaaataactggttcctatgatcagtgtaactttttaagaaactgctaaactgtttatcatgttatattcccagcagcaatgtatgaggattcatttctgtacatacttgccaacacttgatattgtctgtctttatcctaatagcctttctagtgggtgatgaggcatgaattgaagatgactcttgggttttcaggttgagcagttggatgctggtgctaccatttaatggaggttgagaaaggaatgaaggtttttgagaaaaagtcaagaattctggtttggccaagttgagtttgaggtgccagttagcctttgaagaagcaccgttaagtaggaagttggatgtatgagggcacctatgttaattccagctttgtgaattcattaaataatgaaacctgggatggttgcttgaaatttttctaccctatatatgaatctgatggtctggacaagtcacatagtttcggatgtcagtttcctcatccataaagtaatacctattttcctccaaagcttaggtgaggagtgaatgagttaaagagtgcaaagtgtttcttattgtggcggttgttattaatacgtgatttcacttttcatttatttcatttttatgtccattgtggcttctaacctcatatttcacacatagcaggtactcagtaaatacttaataaatcaatsaatgcaagtaatgactatgtatatactagtggagaaggaaggaggggagggaaaggagaggagaggcgaaragaggtgggccaggcagaggagagaagagagggagggagagggagagagagagggagagggagagggagagggagagagaggagaatgagaatgagaatgagaatggatataatttgggttggccttaggaaggagggctctcagaattccacactggagctttgtgtaaaggaagtttatcttctatgacaccagggaggcaacatggaagacatgattttgggagatgtttcaataataagaattgtcacgtgtaaagcatggttgtgtttgcaaagtgtcttatcttcctactagaccttaaacatcttgagggttggagcctttctgatgtgcctctrtatttcccagagccttactaatttcagcatactataaatacaacaaatacctataaaatgagtatgttggtggatgactcatgaacaggttgtttccttcctgtgtccctgggagagcatgtctgtgcttctaccacagctcatgcatggcttgtgtttataatgatttgtttgcatgtctctctgtctgtcctgagctccatgatggcaggggctccatatcccttggctcatgcctggcaagtagtggttgttcagagagtgctggagagaattgttcgagtgaatggatgtgtctaacactgaaggaaagcagggaaaggagaccagatctgtgctctttggagtttcagattgtagctctaaggatctaaatttccagagggagagaaagtagggaaatggtccataactcatttgtcttccattttctgtcccrtgggctaggtaggtctgttcttgatatggttgggagagtggttgcctgtctcagtgttcaatgtcagatgacaatattagctcacattgtaaatattctgagagtgccataccctcaaggtttcttgttaggttatttcattagggagtgttttctaagattggcttaaagtaaaggattttaaactttttctaagagagacattttaaatttattttaattttcatgggttctccaaatgcagtagactttttggcaaaatctcaggtaaacctcatacatataaatcacagaaatggaagaattaggtaggtgcaaaagtaattgcgstttttgccattacytttaatggcaaatacttcagttaatgcaggggtgatctaggacctcacctgcttatcatttctttgtcctttgtcaaagccctgaagcatctgggggactttagggctccttggaaggaagtttgaaaaaccccaggtatagaggtagtctgttcattttgacttcctgtttcttctgccactctcaagagacttctgttaagtctgtagaaagacttccccatgctaccatctgtaaccaccaactacgggaaccctagttcactgttggtgggaatgtattttggtatagccattatggaaaacagcatgaaggttcctacagaagttaaaaatggaacttccatatgacccagtaattcctcttctgggaatatagctaaaggagatgaaatcattaccttgtaaagatgtctgcactccaatgtatgctgcagcattattgacaatagctaagatgtggaaactaagatgtctatcaagggaggaactggccaggcgtggtggctcacacctgtaatcccagcacttcgggaggctgaagcgggtggatcacttggggtcaggagttcgagaccagcccagccaacatggcgaaaccccatctctactaaacatacaaaaattagctgagtgtggtggctgcatgcttgcagtcccagctactctggaggctggggcgagagaatcgtttgaacctgggaggatgaggttgcagtgagctgagatcacaccactgtgctccagcctgggcaccagagtgagacttcatctcagaaaaaaaaagtctatcaagggaggaataaggaccatgtgatatatgtatacaatggaatactagccttaagaaagaagatcttgccatttgccacagcacggacggatctaaaggacgttatgctaagtgaaatgtgcagacacagagagagaaatattacataatctcacttatatgaaatatttttaaaaagatctcaaatattaatacacacgtagagaataaagcagtggtttccatgggttgcgggtggggagaggaattggggagatgtagatcaaaggataaataaaaacagatatattggacaaatgagagatctaatgtacatcatgactaaagttaataaaattgtattagggatttttgttaaataagtaaattttagctgcttttgtcccacacacacacacacacacacacagtaactctgaggtgatggatatgttagtctgcttcactgcagtaaccattttgccatctatatgcatcccgtatcatcacgttgtcaaactcaaaaatacacagtaaaatttatttttttaaaaagaacaaagccttaaaagaacaaaagaacaaacctaacaattgcctccttttgtatttccctttttgtgttcattttcacctcctctttgagcttgaatcaaaaggttttgaggccaccagtaaatcaggtaaacagtaaaaactggagggaaaatgcctcatatttgtgaatttgccattgcacattcccatggtcagtgtctgatgtggatatagaaagcagcatcttgtccaaggacatggctaggaggggaaaccacagcgggtagacgagaggtaggtgtttgtcttaggtcattttgtgttgctataaaggaatacttgaggctggataatttatacagaaargaggtctttttccttcacagttctgcaggctgtataagaaatatggcattagcatctgctggcctccggtgaggacctttgtgctgcatcaaaacttggtgcagaaggtcaaaggagaagcgagcacctgcgaagaaggaccaaacccaaggggcgtcctggctttataacaccccastctcagggaacgaatctattcctttagaaacagtcccgtttcatgagagtgagagctcacttgatcccttgagaatggcaccaatccgttcatgtgggatatgcccccaggagccgaacaccttccacgaggcaccacctcccaacaccatcacagtgggtatcaaatttcaacatgagacttggtggggacaagcaaaccacatccaaaccacagcagcatgaaaggggatgagtcagatcttgggttactattgaaaagggctgtgtgtgcctgctgggattcatggtgcacatggagagcaaaatgagtcctgggaagcagagacttaatgcagmgggggctggctgttaaaattttgaattccctagggcctggcagtgtgagttggaagacaaaaatgactgggtgcctctgggagggcctagcagtccaggagagcagaagctctcagagccagaaccaacagagctggcagaagggagcgatgtttggatggaatcaggaatgctggagttggctgggatggaaccaagaagtcaaaacagtaaggcactagaattagctgggcagattcctgaagcagattcaggtggataagagtttagttaatgtatagtattgcctctgtttaagaggctataaaggatttttgtgagtttatcttgggttgtaacagccgtaaatactggagagatggactgcaacttttaaaaagttgatgtaattcacatgccataaaacttgtcattttattatgtacaatccagtggtttttcgtacattcactttgttgtgcagacatcaccattaaaccgtgaaaatgtttggttcactccaaaaggaaaccccatagtcattggcagtcacttccaattcttccctctgcccaggtcccagcaaccaataagctatgttctgtgtctgtggatttgcttcttctgaacctttcatatatatagaatcatacaatatgcggacttctgtgtctggctttttcatttagcatacttttttcaaaggcccatccatgccattgcatgcgtcagtgcttccttcctttgtattgctgagtaatattccaatgtgtagcccaacaacattgtatcmgttcatcagctgctgaacatggggattgtttgcattttggattattatgaacaatgattctgtgggcatttatgtgtgcatttttgtcaaatccttttctgtgtagagatgatcgtgtgggttctgaacatggttctattaatatggtattttacattgattgagttttatatgttggactggtcttcttttcctaggataaatcccacttggtcatggcttataatcctttttatattttgctgtgttcagtctgctagtattttgytcagaattttttcatctatattcgtaacgatattggtctgtagtgctttaaatttttacttatgttcattattcacatttaaaaagtgacaaaaattgtatttatggtgtataacatatttgcaaatatgtatacattatagaatagctaaatcaagctaattatgtgcattgcctcacatattattttttgtgatgtcacatattgcagaatcttatttttaaaggccaaatagtattccgtttaccatatatattttcctcgtttatctgttgatggacacttaggctgatttcctgtcttggctattatgaataatgcggcagtgaacatgggagtacacattgtcttcagtatactgatttcattttctttggatatatgctcagaagtgagattgctggatcatatggtagttttttttttttttttgagttgaaattttgctcttatcacccaggctggagtgcaatggtgcgatcttggctcattgcaacctctgcctcccgggttcaagtgattctcgtgcctcagcatcccaagtagctgggattaaagatgcgtgccaccacaccccgctaatttttgtagttttagtagaggtgggattttgccatgttggccaggctggtctcgaactcttgtcctcaggcaatctgcttggcttggcctcccagagtgttgggattacaggtttgagccactgtgtccggccggtagttctatttttaatttttgaggaacctccatactgttttccataatggctgtattaattcatattcctttcaatggtgtagatggttcccttttctccacgttcttgtcaatacttgtttttgttgatctttttcataatagccattctaacaggtgtgagttaaagggtctgtagtagtactcttgcagtgtctttgctgatattctgtgtttgttttcctgttctttatttcatttatttccactctagtctttattatttcttcattatttaggagtgttatttaatttccatatatttgtgatttttcctttctttttttggtctgtattgagttctacttttattccattgtggttggaaaacacactttgacttaatcattttaaatttattgaggttcattttatagcctaacatattgcctgctggaggatgttccatatatccttaagtatgtacattctggccaggcacggtggctcacgcctgtaatcccagcagtttgggaggccgaggtgggcagatcacgaggtcaagagatcgagaccatcctggccaacatgtgtgaaaccccatctttactaaaaatataaaagttagctgggcatggtggcgcacgcctttagtcccagctacttgggaggctgaggcaggagaatcgcttgaatccaggaagtggaggttgcagtgaggtgagattgtgcctggtgacggagtgagattctgtctcaaaaaaaaaaaaaaattctgctcttgttgggtagattgtttggtagatgtctgttggtactagttgatttatagtgttggtcaagttttctgtttccttgctgatcttttgtctagttgttctcacagttgtggaatgaaaggtattgaagtttccaactatcattgttgaattacccatttttcccttcaattattttagattttgctttgtgtattttggggctctgttcttatgtatgtttatattggttgtctcttcttgatgaattaaccctgttagcattataaaacgtccttctttatctttagtagcaagcgttttcttaaagtctgttttgcttgttagtataaccattctagctctcttggggtttctttttgcatggtatatatattttacatagttttactttgaacctttttatgtctttgagtataaagtgtgtcttttgtagacagcatatagttgaattttgttttaaaattttaatccgttctgccaatctatgtcttttaattggagtgtttaattcatttaagtttaatgcaattactgatgagataggatttacttatgctattgggctatattctacgtatctttgtcttttttgttcttctgttactaccttattttatgttaaatattttttcaagtaacattttaatttccttgccatttattttcctctatgtttttgagttatttgcttagtggttgccctggggattacagttaacatcttaatttataacaatctaattcagattaataccaatgtaataatatacaaaaactttgctcctatatagctctgttctattccttctttactcttattgtcacatgttacctcttcatagattgtgtgcttttcaacataggtttataacaacagttctatgcttttgtcatttacatcagatagaaaaaagagtacatttatcccattttaaatattttagaaatgcttaaggatatttaaaaaattaaactatgttacatttattttaaaatacatttatactatttgtaaaatattcacttctgcagttacctttatacttactcctatatttcttcattgatttgatttactgtctagtgtcttttcatttcagcttggtggaaaagttcctttatttcttgtagagcaggtctgctagtaatgaactctgtttttatttggaatgtcttaatgtctccttcattttcaaagaatagttttgctgacatagaattcttggttgacagttattttcctttcagctctttgactatgttatcccactgctttctggtctccatggttttcaatgagaaatcggctgttaatcttactgaggattccttgcacgtgatgagtcgcttctccaatgctgctttcaagattctctttagtctttggctattaacaggttattggttttgaattacaaattcactgttagtctgcccacgtttcatcatccctatttgaagggacagcatgggacacttttgtcagtgctttaattcaacacttgtgatatctctgtagcattttattgatctatcaactttatggttcagtaatatgtggttttgtctttcactgttatattacttaatagaatttcagattgatatttatgtgatccgttcccataacttatttacttaatagatttgttggacagctgtatatggaaggctgtatgcaagactttgagttttcttagataaatgacacatgatcctaattgtgaagatgacacatttgattggcagagcacacaaacttaactaattactatgcaattaggatgaaggtatctatgtgcataaacgtagtagtttggaagcaaagaataggaagtcactgattttcataagtggtaaatgagcaaactgaggagattagatagattagcaatttgagaccttgagttatctaaattagaacgtggcagaatcaaggactagaagtcacttttctgggttctttctatgaaacgatgattctagaatgtggctcttttctatgttcaagcatcataggtaaaaatgatttcttaaaccaggtaagtgtgtgaagcacagactggctattttgcttcaaaaggtgtttatgttaaaaataaaagcaaacagtacttatttatgcttattatattgtattaacatgaattaagtaaacaagtgactatgctggaacttgaggtgtcaaaatatgaaaagatacttgctgttattaaattgaccttagatgttttattttcctttttattgttatttgttttatcaaaagaactcttctcccctgtacatctgtagtaaaattttgaataggtacagtttgtattagagcctccttaaaaataaagttgcagatcaatcaaaactatattcattctccataggataaagcatgacatttctgggcatacggttttaattttaatctgcatgcctccgtttctattctcccatgagtctttgcggcaggacaaggaaaagcaagtcttataaaaagaaatacagtatgtggtgcttattaaagttacatacatctcttctcacaggagaaatttgatttattgcaggttgtgcatatgtcgcatatggacatttctagggaacagattccttattgctgagcagtgaatggcttctagtactccattattgctccgggaacatgttagtaataattatgaaaggtaggataccatgaaatctgtaaggtgatttggcagaagtcgatgctgttggtgccaggatttgggtaccgtaccacggtttcctgttttcaaatgtattaattgatccgcaaaggacatcttttggagacaagaattcagacagactggcacagcctggacctccgccaagactgctcggaaggttgccatactgggagcaaaagagtgagagagagaaagagggagagagagaggcagagggagagctgaggaaagaaaaaaaggcaagacttggcacagctcagtcaaatcagcttcttttgtctgctttctcggcttgagcttcaggaaagaaaaccgtcctggggtacagaaaaactcagaactttttggttttcaaacttagaaggctttttaagtctcttgggctatttgaaagtgttggtacatacaatgacgtttagtcaccagtattaagggaaataaaagcctttttcaaaacgaagcttccatagtgtccatgcatttgggaaatactatatttgattttttgcatgtatgattataccatgagagacaggattaatatagaagatggcaaggcaaatttctaattagagggaatattaattttctacaaaataaagtttgttcatcaatacaaacctgctttcaaatcaaatcagaaagacatccttcggaatgtgttcagaacgtaagtttttagattttattttattttatttttagacatttatagacattaacttttcaaggagcctttctaagattttatgcagcccagccaggaagtcagagtaaaagttgttttatccatgtgtttaagaaaacgttttcttaaagcaacagcttttatttctgctgcttcatgctgtcctaaactacatcccccagcaattagtgacaacactgaagaccagaaaggcaagctgaagacaccagacttcgcttgaagggcaaacaagaaatgtgagcttggtcattatttttttgtgtgtctttgctctgaaccatttttgggaggtgggtggggaggtgtctatgtctaagagatgtatgcgattagtgaattctcattgtgagaaggaaatgatgaaaggtgatttttatgatgttggcagaaatggctgggaatggtagagaatagaaatttaaatcttttggagaagaagtggtgagctgtgtttgcaatacttggagaaaaatttcttatttttggttgattagattttataattaaacgattactgtagcctggctctctcaaaatgttttaagtagaaggaaaatttagaaagtttaccgattttctttttaatactacctggtgttttacttagatatatactttatatctaatttctgaacaatgaatctttcctattaggcctgattatgattggattgtgatagttctgttcttaaaaatcagcattattgtaggagaggttaactgtaaggcatgtgttactgtggatcaccctgattgtaagtattctgtttttaaagacagtttgacttgtaggattaagttatgacttcctataatcatgtattttctttttattttatatgccgaaagaatacaggaaaattgtatctattcacataagtactcatcattttgggcagtataaaagactgcccctggatctgtgcttttgtttggagtatgtaatcattgatttcttaatccttcgacaataaaaacctgtctatagctttccattattgcgcgccttaaatgattaattgtttcacatgttttttataaaattatagtgacacatcagcaatcctgaaaatggcatttaatatataaatatgattgaaaaatatatgaaatctaacagaggtgtttgaacagttaagcttaagtatgttcttcaactttttaattaatcaacattttgattttctgtaaaatgaaatcacttaacatttatgtgtgttgccaaaatgasaacctttgtttaataagctcctttatacactacgtcgctgatactcctaaaatggacgccaagacatgaaagacatgctgataggcactcggaaggaaatgtttgcctgactgcagtcttcctttttgaattgattacaggatcattcatgcttatactaaaaaacaacaatatatgaaacaaaaagaaagttcagcaaacaagtttaaattgagcttcattttaatactgaccgtcttattgccgatttatatttacttccatttacttcttaaacatttaacataacttcttgccatttaggtttgctaaatatataacttatttaatttttaagtccattttttcttgaagttaaaataatttttgctagctgatttcttaacttctttgcagcgaactcagaacaaacttatatccaaactatttcatgtccaattattttccagcagtatgatcaaaagtaggtgaattaaaaaacaaatatgtcagaatataccttaagaaatattaaatttttcgatactggtaaaactacattttacagtgtatattaaacttaaaatttgataaatactagctattatagtcactgaagtttcttaccaatagaaattctctctggcctacacattacatagcttaaaatgaaagaaaatctcccataaagatgttccttgtaaaacgggtataatagacacgtctttgtgcaagctttttttaaaaaaaagtgtgattaagaagttgcgttgattacatttttttaaaaagacatttagttgtaacataatgcatgcttctttatttttagaccttttgtactacaaacacattgacatttaggttattaactatttccatattagtatttcaaatcttattttaaagtatataaatactattggtttgattgtaaatgaaccctatctcacctcataattatggtcgtttgaattgtataatattttgaagtaaaattattgaggcagaaatgcgttaatatttaactgctacttgatacstattattaaattccattttgatgtatgtacctgaacatacaagcacattattctacaaattaatgcgaacttctcaggaagcgttagtccagtattttataattactcgctcatttattcatttattcaacaaatgtttattgagcactcacttaaatatgctaatattttattgataaagttattttgggtaacggggatggaagagggaatagatttaaaataaaatttaaacgcctagatagaaaaaggcagtactataatgagattaatttcaacaaagtatgttcacttttcttgcacaatacacatattgtagagtgtgattataaaaaatcaggagattagttgtattacacgtagctgtaagaatcttgttttatgactattttggttgttacattttattggccagaaaacttgagttgttcaagtcttctgacagacatgtaaaataagcaattcaaatcagggaggaagaaactgagawtgagccactgctcacatgctagatcttacatatgtcaaagcaggtgtaattgaaccttcgaagacgtggctgcaacgtaaacaacagtggcctgtttatgtgggatttttttctttcctttgttttctgttgtgagacaaaggaggaagataaggcccctcccacatcctgaggccagcatggccctttgaaagaaggtttgctagggggtgtggtrtattttaaatggacctatcagttcactttctatattctagtggttcgtgtgtgtgtatgtttgtgagtgagagagagagagagtgcatttaactcagtggcctaagtttattccatgcagttgttctctgatacaaaaagaaggcataggttcatctttgaagaggagataaaagtcacgtgatctgaggagatgtacttgtaggctgctttggtggcccaggcgtgaggcagagctggtggcccatggaatggagatgaggagtgtctcagccgtgggtatacactgctgaggtcattcagcasatactcccagaggacttgctctgtgccaggcaaaagatataattgctgcccataggaattcctagtgtagttgggtagaggagaggataggaataattgatgaatgtaggtaccttttcaggttaccaaataccttcgcctgttattccatgtaatccaagcagccatgctgggcgcagggactggtacacaatggccacttaataagtattcatggaagaaataaactgagtggcgaaccagagtattagcttgttgagtcttatttgactaagagagtgttttttccttcatggatagaaaaacaaaaagtactgtgctttctttatcttgtttctctgttgctggctatgggtttagaggggtgcagcagagggccacattatttgtgaccacattaggctctcttgcggtggccattggagatgatatgaaacaaggacttgcctggtgtggggtggccctggacaccggctttctctctggccagccctctgttgtcttgcattccctctgtcctcattttcccaaagcatcccatattgtactttaggacttggtggtgtggcctgagcatgcagcaggccagtggagtgcccagtgagtttaaagtgtttcttttgagggcaggacaaaggcagaggggatggagacagagaaggtggtgagggcagttgtgcagagttgagggcgctgcccagcaagcagcttcagtcctgttgtagctgcagcactaggggcctttgagggagcaagggtgaatgtgggatcctgggttagactgcaatatcagcaaccgcaggcgttgagagggcataaggtgttattgaggggctgcatggggggatgtaaatgggttgctgaggccagttcatgttgaacatcgtctttctgggtctttgtcctgggaggttttgaggcccaggagagggagaggcagagtcaggagcattgtgtatagttctgtgtccaaggcggtgaggggctggaatttagcctcagctttgctgcccaagccctgtgccttgatctgctgcaggaaggtaccaagtccccattgtgcttgtggaggtcctggggtgcatacaggcttggaactggaatagcaggtattgggagaaggtcaaaggtctgtggccagggagggcagtgttccagtatctgaccatggagtctagggggctaggggatgtgatcagaagtgttctagagaacatggtgaaacaggggaggatgagtaagtagaaatttagatcaagtgaaagaaaaggttttgagagtactggagttaggagtttattctgaaactcatcagattctgaataattgtaccacctctgcaaagctcgacttaaaagtttggccgtgagttgtgctcaggttattttatttctccaaaagcaagcagaaagtgaaaaatgttacctgtgtgtgttctgtattgcacgttatcagaggagatgmacattttcttctcttacagttaagaatctctcagtcttacacaattagaataccccttatgtgtggatctggaggttttgtgcaaaatactgaagaattagtccctctggagtgatgccattcttttatccttgtctatcaatgtcatttatatctcttttcctattagcccttctaagttattgtacctcatctgaaaagatcaaattgttctcaaagacccaggagtgtttcaccttagctgtattcatgggaaatctgcctttgaaacaaatagtcctttaccgtcttgggttagagataatgttcctcagcatctccccaaactgagtttgaattttgactcaattttttggttgtgggactttggccaagttatgtaaacctaatttcttcatctgcagaacagggatcatggtatttccctcacacgattttgggaggagaaataaggaaatacatgcagagctcttagcatagtgtctggtatgtagtaaatacttaataaatggtagatattatttatgttttacaaaattatttttttaatttttagaaattgtgataaaatatgcataacatattttaccgtcttaaccatttttaagtggtatcaggtacattcacattgttatgctgccattaccgtcatcaagccacagaagtcttttcatcttgcaaaaccaaaattctgtacccataaacaataactttctattcttcccttccccaaaccccgcaacagaatcgtggcaaccttgattctgttttctgtctctatgaatttgactacttcaggtacctcatataagtggaatcatacagtgtttgtccttttgtgactggcttctttcacttagcataatgtcctcaggattcatacatgttttagcatgtgtcagaatttccttcttttatgaggctgaataatactctattgtatggacagaccacattttctttctccattcatctgccagtggaaacttgggttgcttctaccttttggctgttgtgaataatggtgctatgaacatgagkgcacagatatctctttgagctcctgtttccagttcttttgagtatatccccaaaagtggaattctgggttgacaatttcttttttttcagcgcaacttcagttgtactcccttcttttgcctttgtgttttctgatgagaaatctgctgtcatttgaattgttttgcccttcagctaagatgtcctttttctctcactactttcaaaatcttgctgtgtccttagttttcaaggaatgtgttatgttgtgcctttttgtggatttctttgggtgtatcctgtttggggctcattcaccttcttgaatatgtaggtttatgtcttttgctaaattgggaaagttgtcaggcattatttctttgaatacttccccaggtgtgccctctttctcctttccttccaagacttggaggatgtgaatattaaaactttgttatagttctaccagtgcttgatactgattattttttaagtctattttctctttactattcagattgcataatttctattgttcttaccttcagattcacctattcttttctctgtcatcttcattctgctgtttagctcactgggtgagttttaatttcrgttattttatctgctatgtctttactgagactttctgtttttaaaatttgtttcatgcccatttttagttgtttgtggaaacatgtttataatggctactttcaaatccttgtcagataattccaacatctgtgccatctcaatgttggcatctcttgactgtgttttctcrtttaaattgaggttttcctggttcttggtatgataaatgattttgattatatccaggcatgttgggtactatgctatgagactggattttatttaagccttctgtgttaacaaaccttctctgacactgtgctagcaggggaaaggggggcactccctcatttctgtgaggtgggggagtaggagggtaccttattattggtaggtgagggtgaaattcaggctacccatagttgatactgttatttttattgttagttttgtactgggtgcagtaacctggacagtgtctcagctctgtattccttaaatttagcttatgttgttggtgctacttgtgtttgataacttgtttaatgatagttacattctcaaattagggactgagccttctttaatcactagctacccagagattagtatgtgtttaccactagcacattgaataaaagaatataagagatgacattgtagtttctactttattaatttagaaaaattatttttaaaaggagagaatacgctacctgggtaagatttccatttttttggttattaacatgcgaggttttatcagacttttgcaacttatttttagaagaggtcagtatattaaaaatagtcagaagaaacagatttgactgaaggctttaaaaatgtcagtgataaagtattctgtttcatttgtgaattcaaacctgtagcttcaggacagatcttaaagatgatgcatgtaactttggaataatatattgtcagggttcttacgggtcatctgtgctgtagcattgacagtgagatcccagttttgcatcacttactaactggataatcttgggaaaatctccaaaactctaaaggttgacttttcctataagtgaagtggctgtcataataccaatatcaaagggttgttcagaatattaagtgagataatgtgcctgaaagcaatttagctgataggtatcataaacatgggagacaattatctagttagtttctccagacacatgaggatgatggataaagataatgtacctaattctgtatgcttttcagctgtttattccaatagactgttttatatatatatatatttaaaatgctttaaaattgtktaaatatcgaagaccttcaaatagatagcaaagtattaaataaagtagaatgaatacccatatacccattattcagaagtgacaaatgccatatttattttcctcagatgttaaaaaaaaaaattaaggatataactaaagccttactctctctcacgtctgaaattggtgtagaacactttcatgcacatttttctggaattacrgcgtatacatgtagccataaacaatatattttacatgtttaaaaactttgataaaatattttaaactgttgctatccttttgcaaatgaaattagatatttctgagcgttatctctattgctaatgtgggtatgaggctgtagagtgtctcattttagcgtagccattcttctgtggatgggcgtttagggatctgctttgtgctacccatgctgtcatgaccctcctacacatctgggtgatctctagaggaggacttagaaatggagcccagtttctgaatatttcagctttactcagtaatgccacgccattctcccaagtatttgtaatgtgaacccaaaagtatctgagacaggtctcaatcaatttagaaagtttattttgccaaggttaaggatgcatctgtgacacagcctcaggaggtcctgacatgtgcccagggtgatgggggtacagcttggttttataccttttagggagacgtaaaacacatcattcaatacctgtaagatgtacactggtttgatctggaagggcaggacaacttgaatcaggggcttctaggtcataggtagatataaaaattttgattggcgactggttgaaagaattatcctcaataagaaggaatggctgggttatgctaaggggttgtggagaccaaggttttatcatgcagttgaagcctcctggtagcaggtttcagagagaatagattgtaaatgtttcttatcagacttaaggtctgtgttgatattaatgctggcctgcttttcctgaattccaaaagggagacggatataatgaggcatgtccaaccccccttcacatcatagcctgaactgggttttcaggttgactttggaatgcccttggccaagaggagaggtccattcagatggttgagaggggcttagaattttatttttggtttccagtacccatttatattcctgtgctagagtatcaatgttcttgtctcactgtatcttcaccaacagttggtagtaccagactttaaaattcttgtcaatctcatgggcaaggaatattttgctgttacgtttattggtatagctgattacttagtgagattgaacatcttttawtattggtaatttagatttccttttctgtgcattctgtattcatatgctttgcacagtattcttttgagttgttttattcttrctaatttgtatcatattaactaatcctttgttatgctcatcgaagataccttctcaatctttttttttctcattttccttatggcaactttggaaattaactatggaatatgtttgaaaaattggaatgttttcatttttcattttcagaagtgattttagtaataatacatgcttacaatccatgctttccgatgaggcagagagggctaatgggactaatttcttagaatgcatcagaattttatctccttaattaacatctagaggaaaaagtttctcattttccatgtaaacttttggtcaacttgaaatgtcaggcagattcttagtccccaggcatccatcattgaattaaagagtattgtggagttttactctattatttgcagggactgctatagcacaccgataatgtaggcacattcccattgcatctgcaatgttaccaaataggagttctagggcccttagaaagaatgttctgttgatctgattatagtgctttctatacagtgaataatctcggtgcaataagcactttctccttcccctaaccagtagtcttgctaacaaaataacttaattgagaaatgcacactgttggggcaagtggattgagttgtggctgaggctccttgtgtatcttttgttgtgcaatcaagtagcacttattcaccgactttgctcatgctgtcccgtctaaacaaaacccacctaatcttccaaatcactttgcaaaacaaaagaacacacagaagatatagaaaccaggaggaccaggcggctgtggagtattttaggcagcactccctctttccctgctagtaaccatgtatatgaaaytgctttagtaattatacatctgttttaaaattggaatcggaaaggatactctttccacaatcctataggaaccctccttggttgttcaaacatttggcaccactgcgtgtctgctgatggtttgccacagtcataggtgaggttctgggcagataytaacagctgagggaagagtgggcttgcaaacccaaacgtggaagtcagaccttgaggtatggttctcacagacttgactttcttaaggacagtggccatacgctttgctcagtcaattccagttggccttattgtactcgtttgccatttactgcagggagtgagcctcccttcagcatataggaaccagtgaaatgtcctctcattggctagctttgatatttccttctttctccacttactgaattcttacctggaatcagcatttggctccagtcaccgtctctgcaccattcctctactgtttaaaagttttaaggaaaacttcaataaagagtatatgaaaataatgactgttgtttaattacaaaccctgttttctctaggttatctaagtcagtgcaactctgtgagagagactggcagacacacacaccacacacgtttcaggtgaggaaatagaggcccagagaagtgaagtgcctgggcttgttagtagcaatgctagagtttaaatcaagtcctctgcttccagatttgttgtgcttcttgtgatttcacatttgttcactctgtcatgggaccaccaggagaatatagtaagttggtgcttttatggtagcctctccatacacccttgggaatgtgtccttaggtcattccttctgtctgctacccacccacctacctacccactcacacacccacccacctaactacccacgcacctacccacctaccccttccctccacccgcctacccctctacccacctacccattcacctaccccatctatccaccttcccacccacctacgcaaccatctaccccatccgtccatccatgcagctgtcagcccattattcatttagtctctgagtccctcagtgctgagtgatgaggccacatcatggatagaacacagataaccgctgccatcacccagctgatgatacagtggtgaaggactacagatcagtaaatgtggccaagcgcagtgactgttaggagaggagaaaggatcctgcttttcctcaccttcttgtccctctgcaaytcagagggagaatcaaaattcacattttttagagaacatggatctttcagaatatgagagtttcatgagtgtttttttttttaatttaacacttaagtatagcactctgaaaaataaacactctagagttttagtgtcttagaggtcatttagtttgcctccttgtaacsaaaccgatgaaaatctccttttctgacctcctgagaaatagatgstagaatctctgggcagcagtccttgtggtactcgtactcagtgcctagcaaagaggtccataatgagatattctgtgcgtctctgactcagaacattcctgtttcatcttccacctggattccttctaatgcttttcaataacagatcagtgtagttgagttttgtttagctatttctgtatgtaagcatttttaaaaaaggaaaaagaagcaaaagaaaaccacaaaaacccaacatgctgtttaaataaagaaaaatgagttttacttccaagagagctttcgtcattttcttaatgcttattctccttctgagagcttgttatggaacagagtgtgacagtagtttaccgtggtgagcctgtcttgtccgggccaggggatgaattagagcactgaaaaaggccagaggagtgggcagaactgtacctaaattatccccggatattgctaagtgattctactttttaaagacctccagagagagcatccctaatctcctttagtttgcctttacagtgtttaatgacctttgctgtcaggaaattcttcctcatatttaacccagctgtcccttcccaccaatcactcccatttcttttgttgtccttggtggtgacagaatataggggtcgttgtcttcttgataatatacttaatgttcctgaagggtatgagggaggcctcccttagcccagacttctgcaagtgagagaaatataaattttttctcctttacacccccrttctcagtggttctatttggacatataatctctgacgtttgttcttaagtctctgttgcaaacattcacatcaggccttcctggagatacccattggttccattttcactcacagggcaagatcctttcatgatttccctggctgttgattcattcacattaactcctgtttgttgagccctcattaggtgggaggtaccaccctagtggctgatgggatgtgaagaggagtgactcccactgacttgcacctagaaggaggagcctgaatgtcacctgccagttacagtccttgcgatagtctgtggattagaactgctggttcctctcttccacaaagacttttttttcctgatttatattttggtacatttagagtttacattgaccccatcctcagaaagttaaggcactgtcatattattcatgccctcttctcttgattcattttataaacaccccgaggaagtttgcacgtagaaactttggcctgtgagcaattggcgaggctgtttcccattagattctgtgcagtcctcacgagggggtgtgatggatctttgcaggtctctagcacttatcagaaatgcctggcacgttttaaacaaactaatgactggtggttggttgtcaaatgagttgttgggaaattttttttttttagttctctgtctctccactccttttacctcaacataaaagcagcccagagcttctgcctggctgccaatgtaggcagccctcccacctcagctgccaagctcttagcagatgaaataaaagtctatttataactggcctctgatggatttcctccctacctgggctagtgctccatcagcaggtgtactgaacagatggagaagggttttaagtttttcagttcaattagatcaactctctaggttctggccagcgcrttccctttctcacttagtttcttcctcttggcattaaaattgttgagcatagcaaaacacaaattaagtccaggagataaaatgcatatagtgcctgcctttaaaaaaagcactttggctcaggaaccatatttgacatcatatgctaaatctgttttaacccttttttacctagtgcttaattttaatgtgttttaaatcaatattagagtactaagatgctaaagagcacaaatgctttctttttttacttttcttttcttttcttttttttttttatttggagatggggtcttactctgtcacccaggctggagtgcagagatgcagtcttggctcactgcaacctccatctcccgggctcaaacgatccttccacctcagcctcccaattagctggggcaacaggcacgcacctaccacactcagctaattatttgtatttttggtagagacggttttaccatgttgcccaggctggtctcgaattcctgaactcaagtgatctacccatcttggcctcccaaagtgctggaattataggtgtacgccactgtgcccagtcttttttcttatgatgtatttttagcattggaatttaagtgttttgaaactatatcacactgtttttgaagaaactttatttctgatagtagtttagtttatatgatgaagcattttaatgaggagatgaagtcattcatttcatgatggttgtttgatgtctttttttcacagtttgttgaactgttcaggacagtgatcaagtgataccacgcagtggtccaaaaccagtctgaatatggccttaggctctgggttttaacaccgctagtctgtgaaagatcagttgccacagtttttggtttccacatatgtaaagwttcgtcataattagcaagttcacccttagtaggctgtatcacctcttgttccccacatcccagatttcagtccgtccttggctctcggatgggaggccactctgattgcagccacagttcatgccccacacagacattcactgagcctctgcccagcgttctgacacagacttccacaaggcccacatctggattctttgtccacgctaacaccatcacatttaattaattaatatctttgtgaagctgggtttgaaacaagaaaggtttggactgtttcagtggatgttttgttcatataactggagcaggttttctttggtggttttattttgccccattctttattawttctggatattttcaagagtgtggattatccagatttgtggcttgttctccagcctccctcccattttgttacccactaagatgcatatcatggttgtcaggggccaaaggagactccactgagtcagcctcactgctggctggaagtggggtgcatgatttaagttaggagaaacagtgcaaacaagaccaccgcttcctatttgtgtcattgtctggcaagtgcctttgaagattttctttcattgttttctgtactttttcacagactctcatatttggaggatgagttaaatattacctagaaaatcacttctctgatccttcatctccttggcaggatctgtgtcaaatgtcttgattttcacagtagtgatcgcgctttctcccaggctggctgacctgtgctgtctttggtaagttattctgttgagttgtggtgctgcratctttctatccattactttcatctgtggcttctcctttaaccttttggggtcatacagcacaaaatctaatttcgacacgtggcagcctttcacatatttcaaaaatgacccttctgtattccaccaatcagacaggacatggttcagttacatggtttttctcctaaccatctccagtctagcaatttctttattgtggagtgggatgcaaaaaggaaagtcacatttttatgtaggttctgtctgacaagtgtggaaccattactgacctagttggaggtcaaggaagtgtsagaacttcctgtgtgcttgatttgaccaagtgtagcatcttagtctcccagtaggacaaaagggtttccgtgttatccagggacggggtggatcaactttgatcatttggacctggctttggtcatttcttggtacccattacatggctgggtgatggcagtmcatgaatgtrtggagaatgatgtcaaacagggtgctggatgacaagttcgggtctccagagcacttatgtggtctgtgaacataaatcattccattcagtcaaacctccacccttgccccctccctcattgagatgctacaccactgcgtcttctctctcttggggccacttattcttgtcttgtttgtgaaagccaaaacaataggatgctaggttcttgaggcagataaaatagattcccaggttaactccatttatgatttgtcgatcttttcccttcttcactcctgcagtaagggaattatcatagggagggaccatcagacaggcctttttggggactttttcttatatagcgttaacacatttatttccaagtggtttaaaggcaaaatatatgaatgcctaggtattttgagatctttcagaaaatagaaggaatgggaatgttcttgttcatgttattgggctagtattgcatgagaagagcagtcaaaagcctaaaggaaatattagcagattgaatatcagtttttagagagaacttcttttggttcacctgggtagctggtagcatgctatgtgctgtgagatggtcayacacgctgtctcatgtaggtctcacacaactgccctgtgaggcttacattctgtcattaacggaggaggatggtgacactcaagtggggaccagctggtccttgcagcagctgaggtcatagscgcttcttcctgatgttgggtttttgtggctgctcttggtgagatttatttaccagaagtttgtcttctttatttttctttttaagactcagttttttttttgacttagttttaaattccatttgttaatcctaatagatagtctttgttctctaattttgtagtcacctctgacacccaagtcccagcttttatccacagtcctgcgctgtctccttattttaaaagagcaactcaccacmatcacgtagggtttattccagaaacaaaagaatagttcttaggaaagctagtagtgtaatacagtctattaattcattagaaaagagactgaccatcttgatagatatgcaaaagccatttggtttgattcaacacctactttttcttaaaaataaagaaataaaagctgttggtaaatgagatatagaaggctacctctctcacataatagagaatttctaggaaaagctgttaacattcttactaaagtcacggccagttaaaaatgcctgccacagtcacagttcttcaaccttgttttggaaattgtagctaatgccattaaacaatataaagaaataagaaatacaaatactggaaaaaggcaagagtcattatggtcagatgctgtgattacatggaatactcatgaaaggatatttcttgagcacctactatgtgctaagctccctgtcttgtaaaacttatattagggaagacattcaattaaatatgcaactctaatgtagtgatataaattccacgacagagaaaaacacagagacctatgggaacatgatagccatggctttctgagccctgcaggggtggggttggagaagtttttctctttctcaaacttgtcaagctcatggtgacctcaaggcccattgctgcagccattccttgtctgaagagctctcacccttgaacttttatggctgccttctttgactcagggggtctgggctcagttgtctccttttcaggagaggtcattcctgaccaccccgtctaacatggctccttacccctgctggtccataacagtgtcacccctgcagtgacttctgttggctccttgcatattctctgtctgcagctccatcacctcacaggtatcctccaagagcgtagggcttgtcagtcttgttcatggttttatcctcagggtagagaactgtgtcttccccctgtaggtgctcactaaataatttgttgagtgaatgtgctggaagacaggaggtggagacaggatatggtgcttataggctgccccttcaggaggaagcagagggtggagccctacctgggctggggaggcatggctttggtgaagacaggtcttcttttttttttttttttttttttggaggtgtgtgtttaaatgctgagcgaaaagttgatttgggagatctaaaagaagggggaagggaggatctatggcagactgggataaagggcacaggggttagcctgaaagaggaggggaaacagcttttacctgtaatgggagggtaggaggaggggattgtgcagaactgacgttcataggtttggtgatgggatgttggggaagttttcttctttgaatgatgctrttgttgacagtgagaagtggtgggcttggagatttgaataaagtaggtaataaaatgggtactggccattaagaaagagaatgagacagagcagactgagaaatgtgggaggctggttgggtacccagttaaaggtggaagactgttaatttatggtgacaccaatctgtgagttcaggagattgtgcattgaagccttaagcagcccaggtatttgcatktttttttttttwaaaaaaaagattattaattgtttagtgagatctaattcacatactgtagagttctccattttataattatacaattcagtggttattagtatattcacaaaattgtgtggccatcaccactgtctaattacagaacatttttattatccccaaaagaaactccataccctttagcactcactcctcattctcctcttccccctgtccttggcaattactagttcactttttgtctatggatttgtctattctggacctttcacgtmaatagaatcatgtaataggtggtgctggtcattagcatctggcttcttttgcttagcatggtgttcatggttcatctatgttgcagcatgtatcagtattccattccttttatggctgaataataatccattttattgacataccatattttgacattttatttatccatcatcagttggtggacatttgggttctttttactrttgggttgtttttagtatttggctatctcgaataatgttgctgtgaacattggcggacaagttcttgtgtgaatatatgttttcaattatctgggggccagacgtaagagtggaatttttgggccatttggcaacctatgtttaactttttgaagaatgtccaaactgtttttcacaatagctgcatcattttactttgctaccartaawgtatgagcattccagtttctctacatccttgccaacacttgttattattattttttaaatgacagccatgctaaygggtgtgaagtggtatctcattccaagtgtgtgcatattgaagatgcacttagattgatccacagttgggattttgctagaaggctctatggaaaaagagaggtcttacgtagctgaggatggtggcaagtggataattgaagtgacgggtcagggattgaattaaagaaatttgcaggaccaaggaaagcaaaccacaaaaatttactaaagggaagaaaggaagccttaaattaatgaaagactcaatattgtaaagatgtcaattctcttaaaatctcatatgtaaatgtaatataattctagcagaaatcccagtgaaaaatttgtgaaggatttgctaaaatgatgattaagttcaactggaatgtttaaatgcatgaaaacactcaagatatatttgggggaaaaacaataacaatgatagggacttatttaccagatattaaaacatactataaaattagttattaaacagtgtagttttaggaatggaataaaccagtggattgctggaacaaaagagaagtcccaggttaacatgaacatgtattatagagatgacattgcctcgtcagaagtgaaaggataatttcataaatggctttgggcaactggcttactatgtcaaaaatgtaaagttatatccctgtctcacatcagctgacagcacaataaatttgaagttaaatatttgtgaagaaaaatatattcatagaacactagaagagtaactgcggtcatggkgttagattttgtggaatggaagagagaccagcctcacagcgaagaggccattgaagacttggacagagctggctgtgatgcagccacagccaggaacagtaagaatggcaggggccactagaagctggaggaggcaaggaaagatcctttcctagcaccttcagagggagcagggcccctccagcacctcgatgtttggacttctggcctccagaactacgagaaaatcaatttctgtgtctaagacccagatttgtggtaatttgttgccacacggccctagggaacaatgcagtgactctcagacaggatttgatggagagagtggtcagaaccagtggcgctttctaaaagattgatgccatgagctgtgtttgtctagtctgggcagacaagagatttccattcatgattaaggagggcccacggatctgcgtgatgaatttgaggaggatacactggtcccgcagggcaaggacgtcatcttagtcactgctgtatccccagcrttaagaagagttagaagaggacacagtccacactcaatgactgtttaatgaattaattaataaatasaaaacacacaaaaatgtaaacactatccatttttaaaacaagatactaatttttgaataaaaccaggttgtggtggggaccatagggccagaatagttgccgtccccttcacctcccacttgattcacgcatggtggctcgaggggacagagatgtgagatcgtggctggaaccactgctctgagttggagctgctgaaatggtagcttggcggtctgccctcatggtgcatggcttgaagctacatgtcaaaggaaagcaccatccttgcaaccaatgacactaaaactcaagttagattatggcaagcttgtccaacccgtgggccacatgtggcccaggatgcygttgagtgcatcctaacccatattcataaacttttttaaaacattgattttttttaaattttaagctcattagctatcgttagtgtattttatatgtggcccaaggcagttcttcttccaatatggcgcagagaagcccaaagattggacaccccctggactatagtattaatgcatcacatagttcattcttttcacatagtgagtaaaaagtaattcgtttgataagcaattcttgagcacctcctgtatgctgaacgccatgctacgctctgcggtacagagaacaaagaggtggtccttgcccttgaggcttctacagattgttgtaggctggtagccatctagataagtagacaaatcacttggatatcgtgtgataacatacatgccatcgatagacacctaggatgctgcaggagcacggagcagggtctgccaacacactgggcattgtagattttacatatgatggagttttgagattacaggctcatgcctgtaatctcagcactttgggaggctgaggcaggcggatcacctgaggttgggagtgtgagaccagcctgaccaacatgaagaagccccgtctctactaaaaatacaaaagtagtcgggcgtggtggcagatgcctgtaatcccagctacttgggaggcgaggcaggagaatcgcttgaacctgggaagtggaggttgcggtgagccaagattgcgccattgcactctagcctgggcaacaagagygaaactccaagatggagttttatttgggccatattgaggcagaggctcaaatgtaggtgaaatggttggttaactgtatggaataatgtgaagggagctgaaaatccatctgcccagagcaactatgcaggagcatgcctgaaatggcagctcatatttcttggcctcatgctttctaggagtcctctcctaaaacagagacgcctctgtcagattcctagagttcttctaagtaggcatgcctactttgttgagttcctaggtttgatttttgagggaagagaagtcacaaaggatggaacatgggatgggggaggagagaggttggagcagagcactgggcatttagggaaaagaatcrtgaagggaaaattcctagaaggggcaacaaacayagcctcaaaaatccacagctcttccctagactgggtctgccaggtgccctgatccagctctctggtcagccgcattctgcatagaaaggggagcagggctggtcttgtccccatggaagtgtgaacttggggctcgtcttttgggagcagagaaaaatagttccttgatatacatgtaagtttctatgtggggtattagaatgaatcctagctgttgggagcatgtcttttacaaatcaaattaagtatcttttatatatagatatagatagtctgtaatttgatggtactgatgagagtgaaaacaatatgtggacttgcccatttactgaaagatcaagcaaatacatttcagggtctttttgatagctgtgagtattacttgctagtattaaaatattttaattttcaagaacttggactctgtttcctttgatgaaccagttaggaaatattgtcagagaaaccctaaatttactctcattttcagtcatgaatgaatccctgattactgtgatgaagaaaaatcctgggtcccaacttccttgcccaaatcaacacaaatgtaacctttcatcttgatcaggagatgctgaaggtagaacataaacaaaaacataagaaaccgttcatcactctgagagaggtttaattttcatcagtcaggaaagatacagacaccaaatcaaaggtgttgataggatttcactgtaaggttttggcgattttcttttccctgggtgttmattctccccttgggctgatggtggttggcagagctggagcattcaccgtggcttttctgattcctctttcycatgttggagtaatgtttttagttcattgcccawatagccttggcagctataatcagtcactggagtatatccttgattgtaggagagacttgataataatgactctttcattcatttattccacaaacataggctgagtgttagctgcgtgcagtgaaccatgggaagtgctatggggaagcacagctatgtaaatcatggctccaactatgtgcaaaggccccatgacataaataagcacagaagatgtgtctgtacctctgtatctgctttataacctccctgaggaaatgctacaggcctgatccatctctcccctctttaaagactgtcaggggctctctrtttcccccaccatagagtccaaactcgagcctagtacccaacattcttcagaacctgaccccaagccatctgggtgtcctcatctcccaccgctccgcccacaccctgggctccagcatttgactcttccccagtgtgccgtgtgctccttaccgctgcccctggccttggcactttctgttctctcctctgaggacgcctggcctcatcttcaacagctggtggacttctacacgtccctcaaaaccagctcctctgttacctccaatgtggcactcttttctaagctaccccaattcccacccaaggcagaatttgtctctaggcttgtgctagaacatgtaggatacaggggttctttgggaagaggacattgggaaggcatatgggaatgtggaatatgggaaggcaacaattcttggctttcctggtccagcccgggctggtctggtcccctccagatgatctcagcgttcatgaaggcaggttctggagacttaggaggagggacccctcccygccttccctgggacgtggaatcccctgtgagcaggatggatctagggtatgtcttttagccttctgtatatctgcatagacttttcttctgccttctcatagttcatagcttgtgtctacacaagaactctctaaacatgtgatagcgaattaaagccattaactccattatctgggatattgtttcaggtatattttaatattgctrtataatttgtccataaaatgcttatcttcataatgaaatatgaatgggtctttgtcmgacagaagacttttgttgaataagatgatggcagaacgctgtaggatcctgctatttgaatcttcttggagtcacattccttagcatctagaggaggtaacagaggacatgtggacgtgctttctgctggcgattaagtcccaggcttgggagtggcttgtagcaggctgatgattgaagtctggagtgattctagcacagaaaagcaaccagggcgcaaggtatttctgtgtgtatttggttcgctgatcagcacttgggttacsaagatgattaaagcacagccttgccctttgggagagaaaaccattcaaagaaatgctgtgacaaaagacacaagcattgagtgatcaagtacagcatgtgcatgattattggagagcaccaggttgtcagtgaagacagtcgtaagggaggagagatgaggtggtgggggagacgtcttataatcgagtagagtactgagaacaatgctggggttatctctctggtgtacaaagggactaccttggtcagggtcctggcagaaatgtacctaagagggataattggagaaagctgaaggaagacactatttacaaaggtgtggtcaggattaagagaaaccaacaagagctggcagagagctttgaagctttaccatgcctagacccaaaaaggggcaagaagagagcaatgacaagtattgaaccgtgatataggagagggtcgccctgtaggaattgtgccctttagtagaggaactcagccactgccaaactgtggaaagagggctgggggaagaaataccgagtctcccatcagtgtatcccattggccaagtccaacagaaaccagagttcaagggagcccattgatacaggtcgtgcaacaggatagagagtggtcccagcagagcacacagagactgtcctgcagaaagactgattaggcaccggcaagagtcgtactcagccatgttgagagccctgctgagcttggaaacaatcactttgtgattgtaccaaataggaaggatatgggattctcattgggtgagcaagagtgctttttctgttatttggaagaggtatcactctaagacctgtaatttgcccatccgtgtctggtttytgacactggcaccctagaacatgtacaaaagggtagtgacaccacgatttaaggaccagctstctgtgtatggctcagtcacttccaaaatactaagctaaaatgttttggattcttatgttttatccagcgttacctcacgtcaattcagttcagttcaattacattcggatatttgctgaacatcaagaatttcttggaactatgctggatgtgctcaggatacccagatgagaaggcatggagttagaatacagtaggggagatgatcatgtaaacaaatcgtataattaaagcgaagcctggtgaatctaatggaagctcttaactgacctgcccttgcagactcactgtgttaattgggaagccttgttctctctccaaacgctgtggctgctgggctggctagcctacatggtttcggcttatttggctgtgtctctgtgcacctgtacacgtccatgatttgcatgtttaccaagagtctcctgtgtgtgttcccaaatcattttatgtcagttgttagtaattaaatttatacaatttaattacrttttaagtgaaccagtgaaatatagatgcaaaataaaaagctttcgtttgcrttaaaattaagtcaaacatttcagaaaaagttaataaagggtagtcacttaaaaaatgccatttgaaatgggtacagataagacagctcctcatcccttaaagctggcagtaaggatgatcttgacaacaataagtttgtcgatggtaggcaaaaaattaagactgtaccttgatggtttctcaatttttctgtgagggaggaatgagcagtgaaatgatgggggtgggagcctgaggaccgtgaagayagcttgaaatagataacttggcaggggaacgggaggttgctggctagggcctggagaaggacttgtgggcagcactgaccgtgcatccacctgaggctggagattgtgatttttgtcatggcccccacctacctaaacaactgtgcractttcttttgcagtgcttgrcaggctgacgtagaagtgcaaaaatagttgcttagagcgatccaggatggggattttgtgggggcaggtgtggcaggggtttaaggggaaacgagagttgagtttgggcaagaatgatttaaaagtgacttaagccttttggccagaattgccatttttcattaatttgcctatgtgatgaacatgaagggaaagaagagaggtacctgctatgttttctttctttcttactccctctccctctctcttttttttttgagactggatcttggtctgtttgcctaggctggcatgcagcggtatgatcatagcttactacggcttcagactcctaagctcaagcgatcctcccacctcagcctcccaagtagctggaactacaggtgcacaccaccatacgcaactaatttttaattttttttttttttggtagaaacagggtyttgttatgttgcccaggctggtctgaaactcttggcctcaagtgatcctccttccttgggctcccaaagtactggggttacaggcatgagccactgtgtaaatgttttgtaggacttttagaaaacatggggttgtgcctttggccacaygcatgcttgtggatctacaagaacagcggtcctgtaactcttcagggaaggggcaccacatatctgtcctgtcaccatggcaaagctggaagggtctgcagagctacccagcatgctgctggtgttgttgtaaccaagcagagggcaagattctcgccatgagaattgatgtacatgtctagcatgtgaagcatcctaagggctgaggtgggttcctgaaacctgtggaggaaaatgctcagtgcaagaagccaaagaaaaaggcaccaggctcagcgggagcacccgcctggagaagcatactttgtgaggatcagcagaaaggagctgagtgtggaagctgtccccaagtcatggcacaaaagtattcaaaagaaaggatttctggattgttttttaaaaaacaaaactgtgatgtaaatgatgaattgtgctctgtggtctgattaggaatgtragtggatccagagtacagtggggctgaggcartggaagtatttttttgtgtttttttttttaacttttaggtcagggatacgtgtgcatgtttgtttaatgggtaaacttgtgtcacgggggttcgttgtacagattattttgtcacccggataccaagcctagcaccccaatagttattttttctgctcttgtccttcctcctgccctctacactcaaggaggccccagtgtcttttgttcccatctttgtgtccatgtgttcacatcatttagctcccacttctaagtaaaaacatgaggtatttggtttcctgttcctgtgttagtttgctaaggataatatccgccagctccatccatgttgctgcgaaagacatgatgtcgttcttttttatggtggcatagtactccatggtgtatatgtaccacattttctttttacattctgtcattgggcattaggttgattctacatctttgctattgtgaatagtgctgcagcgaacatatatgtgcatgtgtctatataggagaatgatttatattccttggagtatatacccaataatgggactgctctgtcaaatagcagttctgtttttagctcttcgaggaattgccacactgctttccgcaatggtcgaactaattcccaccaacagtgtgtaagtgttttcttctcttcacaatctcaccagcatctgttatgttttgactttttagtaatagccattctgactggtgtgagatggtatctcattgtggttttgatttgcatttctctaatgatcagagatgttgaacttcttttttatatgattgttggctgcatgtatgttgtctattgaaaagtgtctgttcatgccctttgtccactctaatggggttttgttttttcttataaatttgtttgagtttcttattagatactagacctttgtcaaatgcatagtttgcaaaaattttctcccattctgtaggttgtctgtttactctgttgatagtttcttttgctgtgcagaagctctttagtttaattagatcccatttgtcaatttttttcttttgttgcaattgcttttggcatcttcattatgaaatctttgcccattcctatgttcagggcagtataggttgtcttccagagtttttatrgttttgaggtttacttttgagttgactttttctatgtggtgtaaggaatcagtccagtttcaatcttctgcatgtggttagccagttatcccggcaccatttatggaatagggagtcctttcctcattgcttgtttttgtcagttttgttgaagatcagattgttgtaggtgtgcaaccttatttctgggctctctattccaatccattggtctatgcttttttttttctttcttcttcttttgagacagggtctcactctgtcacccaggctagagtgcagtggtgcaatcgcagctcactgcagcctcaagtggaagtctcgatgagatcagggaggagtaggtgtgaagacagtagaagttctgggaggctgaggttggggaatggccctttgaccttgggattgcagaggtcgaggggcttctggtgtgggtggggctgcagccttgggtggtgtaagtgaagtgataaagaccactggatcagaagacatctagaaacatagaggcaaaggggtttcaagaccttctttggggacattgagaccaccccaaactgccaagatttgtgatagataagtggacagggagatcattggcaaagccattgataaatatggtgacagctccaagaagattggcaggcgagagagaggctgaggagtgagtgtggtataatggcatgggcctcaaagggcttttcmctaaggagaggggaatggtggttttcccctgtatgatttctttggkgcaaaccagacccgtttttctgtaagcacaaaatttgtgcttttgattagcagaatatctgctcccatttgaggaggcatctgtctgctatccgtgtgactcttatggaaaattctaaaagtgactggtgccataattggagctaggactcacttcttgctcctatgattctactttgatattaaataagtttcctttatgagacaccagtcagtaaatagaacaggatgtatggttaaatagctaaaattattttcatcattgcaattatagtatgccttgccatttcaaaccaaatatccacttatctttcctgaaattttgcaagaaatctattattcgaggatgcagagatgatttttttttggttgagttaaacatttttatggattagatatgaattcagtaaaaataattgwattgggtaatatgaataattcatgacatgtaatttcacatcagttctaccttaaaaataaagctattggtttatgtactgggaagatgtattttattatttagaaaggtagagaacattattttggaatataactcactgtatgattaactagatacattaaatagtaagattgaaagaaagtacagaattcaaactaaggtgctttgatgcaattcacctgttccatcttcttgatgaaacactagttgctctgtgtctgtcattagcgattccgcaaggcatgtggtgataagacttccagattttgaggatatgtccagtaattgtgcttgaacattgtaatgggtgtgacggctgccaggtgcctcatttggggagtaggggacaactttctggctaggtcattctttccaaagacatgtactctctgcttcctctgtgtgtagcccagcatactgggacatccatatgactaaggcttggggagtttcttgcagagtggtgtggtggcacagatcaaaatcttggtagaaaagtgagcccaggtagtcacaggcttgacccaagcctggaaggaggagcaggagttagctatggagaagaagaggggagagaagggggacactsaggagtgagaatcacctgtgcagtggtaccagggccagagggagtcagtttggacctgctggctgcaactggacggaagaagcacatggactgtggtgggagatgaggctgagaacattgggggccaggctcctgaaccgggctaaggagcttgaacctgatcctgcaggtatarcgggaaccactgagcagcgctgatgacagagatgttctgtgttggtaccayagtcagccgaaagtctctcgtgaaagttttccctcttaaatgttkgtggtggtagttcaaaatkgaattggtccacaaaggtattgcacaatagaagatgcagtatcttaaccattgctatcatttgttgatgaccagaagttcaatcacagaaattgataccaatacctgttattactcacaacaatgcgtcatcctttattaggctcctagtgccttttggccattttacactaagacaaaaccactaactgctttaaaaggcgttggtcacaacttttatgatttgagattaatcaaaggcaccgaatgtcagagtctcctacagaactcagccaacttttagggcaaggctctgtacttctccatctttagaaggaaagcagggaaaaccgtggaaatcatgctactttcattctcttcttggaggactatcccctgggtaaaaattcaaggttcttctaattaatacattgtaactaacacattaatgaatactgcctggtgagatgagttgtatcttaggtcacagttgttgaagccagacaacgtgaaagaagatgatgggcaaaatggatggttttagttacttcttttttaaataccgtattgtttttgttaaatgatacaagctttctatgaatgaagtaaaatagtacctgaaatgcaaaggaagtaaaaatcactccaaaatttcatcctctagaacagcagttcccaagctctgtggcaccagggactggtttcatggaagacagtttttccacagactgggggcaggggcgatggtttcaggatgcggctgttccacttaacatcatcaggcattagttagattttctttctttctttcttttttcttttgagatggggtcttctgtcgcccaggctagagtgcagtggcatgatgtctgctcaccacaacctctgcctcctgggttcaagcaattctcgtgcctcagcctcacaagtagatgggattataggcgtctgccaccatgcctggctaatttttgtattttttagtagaggtgggattttgccatgttggccaggctggtctcaaactcctgagctcaagtgatccactcgccttggtctcccaaagtgctgggattacaggcatgagccaccatgtccagcctagattttcataaggagtgcacacgtgcttagatatcttgcacatgcagttcacaatagggttcgcactcctatgagaatgcaatgctgctactgctctgttaggaggcggagctcaggcagtagtgctcgctcacctgccactcacctcctgctgtgcggcctggttcccaacaggccacagcctggtccactagctaggggttggggacccctgctctagagttaactacagatgacattctggcgaacatactaccagacatttctctagaattcataactttgtattcttagtccttcttgcaaactctggtgtgcttggtcctctctgtaggatatctgttgagattgcctagaatttttttttctttactcttcaagtttcttaatttttgccaagtgttccattattggaacgctaagcatgtgggagttatttgtatcctactcarggtcatcgccaaggtctgtttgcaaaaattcaaaaaattgcaacctcaggcataaatgggtacggactatgttcaattttgtttcttctttttacagtgtgtggcttgttttgtaaacaaatgaatacatgaattaaatctatatggagtacaaagggatgaaggagaaacagcttctgagctgtttgtaaccatccttgtttgcataacctacttattattgaattcagttcagagatcatgctggtggtcatcttactggttagctttgcctcactggactagagtcactcagatgaaatgagtggaggatgatacattaatgttttccagagatccttccctgtagcttactatttaacatccaatccatcaatggatatttgatattgggattaaggtactagttatatttatggataaaagagaattgggttaccttagctaacttgatcaaaattcaaatggttgtggttaagtagaagaaataggtaattttaaaatgccagagtttgaatgagtgcaagtaaaggcatgtagatatgaaaacctcatccttttatcttgatggtgttttgaaacttcaagtattttttttttcagacctccaggaagaatggattttttattgccttcacgtggggtggtttctttgtgtacgtgaatgtgccaccagggcagtgtttctcctggggcagtgtttcacagtggggcaagttgtggacccacctgtgaccgtggtgcatttccagagaggagaactgcggatcttgtgcattctctgtgtctccttctatttttcaagagacctttaaaaagtttctgtctaggccaggtgcgatggctcacacctgtaatcccagcactttgggaggccgaggcaggtggatcacccgagatcaggagttcgagaccagcctggccaacatgatgaaaccccatctctactaaaaattcaaaacattagccaggcgtggtggtggaggcctgtaatcctagctgctcaggaggctgaagcaggagaatcacttgaacctgggaggcggaggttgccgtgagccgagattgcaccattgcactccagcctgggcgacaaaagcaaaactcttgtctcaaaaaaaaaaaaaattckgtctaaattccagtgatgatcagatgtgaacataaacacgttcaggatcatatacattgctggatttgccatatctgactttgtctgtttctaggatattcgaaattcwgtgactcctattaatgtatcattctcctggggcatcacagctgaggctggtgtaggctcactagtagcccagcctggaaaacaagctactcagcacactcctcttagcttggctttgttgtgtgtgcacttcatgagggtgatgctgcccatgtgatattccagatgtaggtgagtctccagaacggacagcagctacagtagtgtatcttttagagagcacggaagagttgcttaaaacttcttttctattcaactcttcatcagaggtactcttcatgacctcatctattcattcatgcaacagatatttactaaatgtttacgttgcaatggacatagtagaatgaatcatcaaaagcttgttattatatattaggttgattttttccaggagaggagtttaggaagacattcagtctccttggtaaacttgtacatgcctttactgtcagccttacttaaccctttacgctatataatatgctttctctcttaattttctcamgagtttgcaagccccttgaggggtaaagatggtatctcaactcttcgcagttctattttatgcaaatagaggcagtggtggctaattgatgattccatcatccagaatatcttatgcctctagcttctgastgacggagactctgttttttaacagatgatctgaaatgagtttgctgtaggttctttgctgtcttggtcacccctggacatgattggtattctgcatgactatcattggtagtggtagcatggtatcgtaaaggcaaggatgtaaagagaaacaaactcgggcttcagggtgaaaacctttggctctcctacttggaaaatggacttgacctgaaaaatgagaattaaagtctacatctttcagggttattcagaaagttaaatgaaataaaataaatataaagtgatgaggtgaaataatttcttggaataatgagtttccttgattcacccttgagcagacacctgttctcttgccctgcagcctctgatgcagggaaactgagagcaccaagcaggaccttgaggaagagaaggggaagaccagctcaggaggaggcctgattctcatgcaggcttagagcacagcatgcatgggttggactgtgcagatcagaaggggtgggaatgctgttcttacaggcttaggttttctctctttattcctccatccttgagcccctggaggttcaaaaaagcaaagataccagttattaggaaaaataaagacattctgtgtttgtaagtggctgagttgaatctgtccaaaccagcttayacttgtgcaaactctgtgtctggcttgcacagggttgacattcagcaaatagtagttccattccccatatttctcctctctctctccgtaatgataaatatgaatacatacatatctatatataaaacctgtgacataaaatatatagaagcaacttggatattaaagtgtgagtttgtatgtgcacctatccccatccatccatatgctagcagtacctacatcccttggaagtaactggataattggagacatgggtgggatgttgaaggggcatttctggtcatcttaatgactgggagtgctattggatgtatcaaggacgctaaacattcatcagactgtcaggcagtcccttatcctcaccaatagagaatttttctgccccaaatgccagtagtacttccattgagaaacactgtatactgacagtgtggaacatttctcagcaactttgtgaattagagactgctcattattctatcatacaggataacaacttttcaggggaagttatctttaacttccctgtgccccgactaatggtattactcggtgagaatgttgactgcatgttgatccccactgggggattctagacatgttaagctctaacatgtatgtgaatattatttcagatctgagggcattgtgatcattgttctctttctgttggtgtggatgaaataagagttgttgctgcttggatattttcccctccgacattctttcactgggaagctattagacaaaaattgtgtaggctttgtggacaagacatttcgacggaaaaaataatcttggcgtcactatgcacacacacagagaccgcacatacaaagcgattttggagggcccttttgaaattacatagggaaaccaacagtgccagtaatagcacggggctctatttctcacagtgcttttgaaggcatagaaagcaaatgacaattctggcggtcgctaagatgtattttgcagtggctggaaagaaactagcattcttagaggagtccagcaaattgtctttgagcctttgagggcacacagaaagctaatgacacctccgaggaatagccttctcaggttttagatgccacagatgctaaagccaggatataaaacctttcttatagggcctttaagaatcctcagtgtgcttttattagcaagctgagtgtgtatatagagatgttaatggtctgtggagcaagctcagcttgtttttgcaaactacagaactataaaagttatcagaaaggacacattcttgcctattgctttgttcctttgtttcttatttatttccttctctgtggaatgttagggcactgatcatgtgctgggtccygtggatacaaaggggaatcctctgtggattcttctctctggaagcttgccctccaatgtaggagaaatgtacacgttcatatccacagtgcaaagtatagaaggcaatgacaatgcaaataaagcctaaattaaatggaaatttcgccacagaagaaattacttctagctgataggatcaaagaaagctacatagacaaaagagtggaaatggtatttaactattttcaaggatatgtaggatttggscaggtagcaattagctttcaggaagaaaagaagacttattgtaggggagggcagtccatgccggggagtggcattcacaaaggttatgagtgtgaagtgagaatagctaaggttagcaggttcgtaggtgtacactcctgaccgttgagagaatgatcctggatttactgctcgttaatgaatggttaggaatcctagtattcacacattgatgkgctacagaaatccctatggagcttgttagaaatttctatccctgggaagctctccataccctgtggttagaagatctcagagatcttgccgtctctcattccctatggccagtgtccaccctgcagccagccactggggactctgtcgctgcctcttcctgagctgggaggcgatgctgggatgccagaaacacacaggagggaaatggagaacacttttctcagaagtataatccccaaatctcctcttaagccattacaataacatctcatattttatttaattttctttaaatggaaaaaccagttataccaaatgaaaacaaatgactgaagaagaactgaatgatgtttataagccttttatatgattttttaaattgagtttttggtctcctaattgattaataaagggaaagacagagaagactgacatgtgttatcttctgtcacagttcagatagagtgaaatgactcccaccttgccaatacaattctcaaggttgattgctaattttaatttatctgaaccgtgcttttcaatgaggtgatattggtcctgatcgttctgtaaattggagattttgcccgaggaagttaattctsccctttcacaaaaaaagtttggactttcagatgacttatttgacattagcaatgttagattcttgctccactgcagctctgcctggccactctctgttctttttgtcactgaattctctgaagcgtgtttgactctgcttaggggacccccatcactaagcctggggtctggttaccatggatcttaggcagtttggctgctatagcagcataccgtaggctgggtggcttcaacaacaaatttatttcctcacagttctagaggctggggaagtccaagatcaaggcactggcagacttgggaagtccaagatcaaggcactggcagatttggtgtctgatgagggctctgcttcctggtttacagatggtcaccttcttgctgaacagagagagagaaagcaggctgtcctataagggcactaatcccattcatgatggatccacctggtatatttaaaagcccaatgacagtcctgtgagacatgtaatagtaataagatactaattgctgtttatcaaatgagccttgtgtgccagggactgtgataggatcagaaaggttaaacagtttacccggagtcataaaatagatgtttaaaatagttgcagagtaggtacacaaagrtatgtcttttgacttrtctagatggaccccataatgcagaagaacgagtcttggccatttgcatactgacacttgggctagcaggccagaaggttctacaataggcctggcctcaaatatatttcacttgtaataagcaccatatggggtcctgccttggagctgagtcatacaagagtgcctagagtgccttttaaaggcctacagccatccaactcttagggaagggagtccgcattggacttgggtgctctgggaagtggtctggttcctggatcaattgttgatgaggtatatatttcaatcatgttttcccacggactgtggggaaggcggtgagggtggctggagacagggttggttggggagaaggggctgctgttggttgaacattagttacacagagctgcgtgctataaattctggctcactgaatcctcacgaccactctgagacttatattattaatatgtattagaaagaggacagtccgtggggtgctctgcctcctggactcctccgtcaggaaggttgttggttcagggccagccactgcttggctaacgcctcagtgcttcagcgacaaggaccaggccgtgggcacaaataaggtcttaggtctctcctctgtgcacatccaggagagagattttagggatagttcctactggcttcatcactctagggtttaaatctgggctttgctgcctaccagctgtgtggcccttccagygtgaacctgtccagacctgagttttagtatacccacagtggggaaaaaagacctacatcacagggttattgttaggcttaaaggacgagacagatgcaaagtactaagcatgtggcctggcacaggggaagtgctcaggaaatggtagtgactgttaagactgtgatacttggaggctgaaccttaacaggatattatcctgacctgtcagtttagctctttggatcctatggtttttttttgttgttgttcttttgtttgytttttgagatggagtctcgctctgtcgcccaggctggagtgcagtgtcacaatctcggctcactgtgacctctgtctcctgggttcaagtgattctcgtttctcagcctcctgagtagctgggattacaggcacctgccaccatgcctggctaatttttgtatttttagtagagaaggggtttcaccaccttggccagcctggtctcccaactcctgacctcaggcgatctgcccacctcagccttccaaagtgctgggattacaggtgtgagccactgtgcccggcctggatcctatcttaaaggamtttctgtggtgataaattatgaaatgcctttctcgtgccatccgacctcctstgttcactctctgcacctttctattgtttcactggaagtgtcatgatattccatgagcacgttggttgctattaccacgtaagacaatgggaaaaaagaagcctccagcttctgggtgtttaccgtttggaaacacagcacaacacttgacattctcagtgctgagctcatgtagaggcagcagacagactgcagatacgtgcctgtcctgccccattagctgcttcgcaatgggggtttcagtttatccctgtgccggtgttgctcccaaacacggtgaccgtggggcacatccatgcctgtctcacataccaaggcactgtcagcatgtgctcctgctgcaggacccttcggccaagggattcatcctgcggcacaggctcgagtctaagtttacccgtgacctgtggtcattctgtggacggcagaccaggcatgactgcacgcctcgtatcagaactcggaagcctggtggtgacaggaaacagtccgactgctttagagaggtattagtgaaatgtctaggagggcagtcttctcctatggcagaacagagcaactagaccaaacgcttggttgaagtatatctttaagtctttgattaaacatgccgttgcattttctgtttaaatgttgttttacaagctgtgttctgactgcaaggtagggtttctaagaaatcagtcccaaagagctcttgccccggagtgtttgttgtgtagcctaggtgggctgtaaaagctagagctgttgctaagggaaccaacggaggaatgtgaatttgtaaatctctcaatcacattaacattttgtgtaatatctgacctcagctttactttaaggtgaagaggaagctggtgtaggaatgatactggtcaaagatcaatgagagaggcactgtcattttagaacttgacactttgtcatcagcatttctatttcactcttgtaatacacaattctttatttctttgtaaaaagtcctatataagcaatacctgccgtggttccccacttttcaggccatgccctctgtgacattgggggttgcctattttatagagaggcagagtggtgaggagaaagtcattcggtgtttttgccgttgaaacctaaatctctaaggtgacaaaagaaatcccagtttacttggcatgagagagttttgccagttccattctacctaaaatgctcttttgctctgttttatataagagaggaagaagtcattttattgtgctgaaaaacagtggaagtaaagttaccaacgagtaatattaatgacttcaattcataatattgggataatgactaatgtgccaggtattatattaggtatttaatatacatgatgacacttaaatttatactatggtcaggcaaaggtatggttcatgatcccaagcatataacatgcacaccagctgaatataagatgaaagcaacattctgtgcattcgcgtgcccctatgctaaatatacttaggttgacccatatgaaattgccatttttatgggcaaagagagccaaatatcggtaattccaagtggttcagcccagcacatgtttgcatatacgcaaactggcagacgcagttctggaattttgttgagacatccccaaagtgtttcacaggcctacagacacgtgggtcttttcacagaggcayaacgaaccatgcagaaaggtagaatcctcagatgctttatctaataatcacagaactgaagatccagaaggatccttgggggctgcgtgttgcactgtggttgtttaatagaagtaggccccatgaggtgaggggacctgcatgtcgggtgagttagggctgactgtgaggctgggacttaggcctgtgtggcatctggaacactgtattctatccattttaaattttaggccatgaaagtgagtaacacatgggctgtaacttagaagtcaactaagtgataagggcttgcagtcacgctgggcacagggaccccgggcagagaggagctctgcggtgcagagaggcacattggtgaagggagccaggcattcagccacatggtagaggagggcgtccttatctatctcaactagcttctgctatcggacttctggggagaaagggtttggtgttcaaggcctaacattgcctttcctctcagaaggtctcgttcatgttacacagctttgttcaccctgagcctagcaagctctgagctccttggagccaccattcctctctcgtacgcaagaaacaagtcccagctcgggagcccacaagattaaaaagtgcagataaccagtagccgtatggaatcatatgtcttgacaggagctatggacttgtcctcatttttaaatttatagcactttgaaaaatcacaagtgtgggcctgtacattgtagcatatctcttttgacacagtgggaacgagagcctttacgtcaagggatactggttagatgcaggccttccagaagcttctgcagtagcatcatcacagctgccctgaggcaaggcaggagcccactcggggtcaggggttcaatgtcgggtcccctccttgcaggacacacttcattgctgttgggggtttcacctgtgactgtgtgtcttgccctctccttccccattcttggtgtgtctttgtaaaattagaacttgtgtcttcttctctccacatccctgtactcagtgtccaccctgctgtctgtccagcatggacggcaaatagtctgtcaaacacctctctagtcattgtcgtcatgggcccaaaaagactgttagcctctttaccrtatagatagatcaaatatatatttttgtcgaattctgcagtaacctgtgatgtgcgttggcctgagacaaaaattcgcttccatcctcagatccttgttgtgttctgaagagggcacacatttaacagaacaaagctcgtctgctttgctgggacgatgggtggctcgcccagcaaatcatcattggagccttctttattttgacgtgagttttcaaaaatagcatttctgcttttatttctcgacttaaaagcatattttaaaaaattggttttctgcatttgtgtaatcaagtacaggaatggttttatggttttgtttgacttaggaacgtcttggtgcctgccatttttcacggccatcatctgaaaggttctttccactttcacaagttgttaactgctttctttgagagcaagcaaagtaggctgcctcaaatatacacctggaatcggtatttatttccttattctgtgccctgtttcattccaagattgtggtatactgggaaataagagaattcaatgaaaagggcttctataacaaacgaactaacccattagaaagaactgaccataagcttagtaggaatcagtcatgtgatgttgcagctaaaatagcgaatgctgtggttttcaaacttgtctaaagtgggagaccccacttcctaacagtgttctgatttgggaccttgtgcacaaagtgggcagtgggagtggtgactggggaggtataaggagcttagagcctggatgggtgcctgccctgccccttccaggtaascccctgaaacttgaaaaccattatgttaatacgttaattatatagctatagggatcccttaagtaaatacaaagttttattactgtagaggcatgtttttatacattgttttatttgaccctgaagaagagaccgcaaaggcattatctctagtgtctgtatttttcatagaaggaaactgaagatcagggagattagtaccatgatcaagagcacacaggtaatgcrtaaggcagcagggattggaatgtgacttagtttagtgctcatttcactgggtcacaggcgtatatagatgaaataagagccttggcttcttggagctggtcagactctttctggattgttttgttcagtgatgggtggtaaattggagaatgttgagagaggcgtgactgggatgtatccctgtgcagtacagatagaggtgaaagattttaaaatggatatctctttgagaggtaattcattggtgtcagctggtttcaataaaggtgctatctaaagaaaaaggtgctatctacagaaaagcttgaagatgggagggtgtgggagccgcgggacacggtgtggatgtcacagtgaagggagaaggagaagaaagggaggcccaaggcagggcagaatcttgctgcaacttcgatgttgagcattctggcccacgggacacacacagcccaccagttttcaaaatacattctttgttcctttgccaggataagaaataagacggctgctttcatgtctctacttctcaaatatgtcagtcttttcagtgacattcttttattcaatgtagtgggtgatctgaattgcaagaatatttcctattttcccatgggactaaattaagttatttgcattttgaatggaatagaagactctaaacacatttatttttttcttcctgaatcatccttggaaaaagaggttgctcgctgttgatttatttcacaattttatctgggtaaaagccacttgcaaaaccactccccttatcttagtacaactgtgctagtgcagaactaaggccaaagggtggaaaattccgtgagagtgatttggattcactcttaaaatgatagcagcagcagcagcagcragactcacagcagcagagctagctaccagaaacaggtggccctagagctccttgtccccagaaatacacaggtagaggctgggtgctgtcagtctcagtccctgaggagtagacctctgtgttgggtgttacattaggccagtctgttcttttgagatctaagattctgttattttaaaggctttcattactatcccattagaaggatcaatttgaatttcttgtatttgagtggaaaatgccgaagaatactgaggtttgagtttctgatgttttgtgaatttttcactgttgatatttcatcagaaagaatctgagaatgttatgatgtaaagtgggccagatttgctaatctattttaagaacatgtaatctgtgaataataaaagcactgatttgaatattggaatgataaagcaatattcttaattttaaatgattcttgttttaaaaatagcatgttttaaaccacttctcatgatctttattttcacttattttttatactaaattcgggggcgggggacaagtgcagttttgttacatggatctgttgcgtagtggtgaagcctgggctttactgtagccgtcacccaaacagtgtgcattgtatccattaagcaatttctcatccctcatcctgcttccaccctcccaagtccccgatatctgtttttacactctctatgtccatgtatacacattatttggctgccacttacatgtgagaacatacagtctttgactttgtttctgagttatttcacttaagataatggccaccagttctattcatattgcttgatttcattctttttcttggctgagtagtagtccactgtatgtatgtatatgtatatacaccacattttctttatccagtcatctggtggtggacattgaggttatttctatatccttgctattgtgaatagtgattggcacaggtgttgctgaaagtgtcctgagtgtaagaagtagagaaggattgttttcctcagtgttgtgtgtaaagtgcccatattttatttgtgtaggggagagaagatttctgttcttacccatcgctgggtttctggctgagtcatctatagcaaaagacagatgaacaggaaaaaagtatacatttatctgatgcaagttttctgcgacacgggagccttccgaaatgaagagcgagggaaacagggaaacctgtgtattgtatgcttaggtttgatgaagagaggacagatgtggaggagtgtggtgtgattagacaaaggaggagtgagctaatggtgataaacagagggatactcagcaagtcctgttggttctgattcttctctgtgtccctgtgtattcatagatgtggttgttccttcctccagttacagggagggcacttcaccaatgagaatcttatgacctgccataggggagaagggcaggaaaagggcatagagtagccttcctgcttctgctgctttcttgaatgccacagtgccatattttcaggtagcatgtcctgaaccccatcatttgcatagctttacaaagatttcctatttttatttttgattggttttcacatttcaggcatttgccataaatgtttagctttaccttgatctacgagatttggaatttgatggcctataataaattcacgttttagcataccaagggcctgatattacaagcaaatgaacaaacatacaacccctacatgaactgttgtgtaatatgcataatttctcggtttctctattttataatttggatttttctgcagcagggatggagagagcacattttctatcagaagttaccagtgcacaggaaaaatgagtcaagatcaactgactaaaaagaagcttaactcctttaagagagaagtacgttctactttgctttaaaaaaataagaacagggacataaatctatctaatggctaaaaatagaaatgagtgattgaggatgaaaaagagaaggaaagagaaagatcacagacacagacacactcggagacttcacagtaataaagaaaaaaaatcaaggactcagagtgagacacagacaaaacgagccatacacctaaagatgaatatatgcaaggcaggcaaacggaagtcctttttgggggctgtgcaaatactggtgtaasataagaaaaggtgatgggcagatgcagtgagttgtagagggcctgttctgtccaaaggcactcaaatccaacaaaccctgcgctcaccaaaggaaattcatctgtcatccactggccaccagcgtagaccctgggttctgaacacccacagaaatgggagtggacgttatactgagtgcttaccctgtgccaggcctggttctgtgtgcctcgcccctcacgccttataatcctcacatcaccgtcgggaggcctgtgcaactgccatttccccacttcagaggtgaggaagcagacctagaaaagtttccatgacttgtgtgatagcacacaactgatcaaggatgagttgaggtttgaacccaagaagcctggcaccagaaaggaaaacgcactccaatgcacaagacatacattgtcacccacacaggcccagccatctcccctcctgcttcatctaaccactagaagtgcggggatagttatggcagagacaaagaaacccactcagagaacacacagaagccttagagctaagcatgcatggagtcacatcccagccttctggcttctgctgtgcacataatttgtatcctaattttaatgcagtcaatgctgtagtagacctctgaaagatacacagataaatgggaccagagtgaaggaactcacctcttgacaaatgcctgctttttttttttttgttttaatttagtttgctttcttcttttgacctggcataaaatgccaataagaatttgctagagacaaaacttggcagcaggttttttgccaggtgaaaatggggttctaggattaccgtggttgcactgtgcctagctggtagtaggcactcagtcaatgttgatgactggatcacgagatttagcagttgtttaaccatcagtactctcccaattttcaggatttttttgtttgtttgtttggagatggagtttcgcacttgtttcccagtctggagtgcaatggcgcgatcttggctcaccgcaacctctgcctcctgggttcaagcgattctcctgtctcagactgccgagtagctgggattacaggcctttgccaccacggccagctaattttgtgtttttagtagagacggggtttctccatgttggtcaggctggtctgcaactcccgacctcaggtgatccacccaccttgacctcccaaactcctgggattacaggcatgagccaccgtgcctggcccttatgtacagtgtttccctagttatctcagaaacttctctaggccaacgaggtaggtaataggattcccattttccaggagaggaaaccaagacccagaggactgtctggactgcggtcttagagctggcaagtgatggagatggcacctgagggcttctgcttctaaatccgtgttctgtcctctaggctgcactgcccttcagtggtttaagtggaaagccatggatcaatctctagggaaatgtggttttcagagcagtagcatttctgacaaaggtgaagctctgatttttcccctctcctggaaggaggaatattaaatatctgcagtgtctgaatttctttaaccttccctccaatctttagtctctttaggaggttatttacaactctgacttctgtttgtttttaatgtcctctgcaattgaaagaagacagtgagtgtgatgcttaaatgtagtagatttttcccggactatttgataagatctattttgtaaaggaactgccaaagtcagttgcgataatagccataatagttttaaagtgatgttttccaatgcagattcacttattgcctggtttttgaaattattttgagtaactattagaaaataatactttaaaccatgtttttatttccaaaaactctaattgaaaattaaacattcttcagaacaaagaaagcaccttccttttcccagttcccaccctgatcctttattttgctccatttccccataaatccagataactttgttatgtggagtaagaagtagaagatttcactggggcatgctttgacttccccagttccctccatcaaagaattaagcgtaatttttatccaaagaatgggatgaaaggaggattccctgcaccgtcgttttggtttgtcctcttctttcacggggaaagaggagctgaaatgtgcttaattgtttgctgcatttcctgtgcacatgtacttatccctcacatcacccgagaccaagtgaagagggagtgtttagaaaaaagagagggaggctgatacccgttgaaagtaaaatgctggcatcttaattttaagagaacacagaaagccaaatgctttcagaaaagggtcccttcacggagtaatttgcctggtatggcatcccagtttgttgtataatttcagccccgttactatggtaacctgctttagtgtcgcrgcgattgttaatcaggatttgtcgttattcccctttcatcacgaggctctatatccttatggattaaatcgcagttctcatcgacaatggcatagatcaaacattattgccagacataaaaccccgggtcgctccctgtcattttccccgttaccagaagcagcaaatgcaagctgaagtctaacttttgcaaggaaatcagggctccttctggctcctctgatatctaccctcatgacagaattccaagcaagagggccactttcgtttccaatcaccctgtgcccatgggaagggcaagcaccattttgcgtcactgcaaacctgactcttcagatacatatccagacaaaaagttgttttaatgtgacctctaactcttcctcaaaccttattcttattcttggagcagccgactttttctttctttctcatcgattttgtagattcttgtctgctgcttttctataggaagtccgtgtcaagaagcaggggagaccaagacgccactcctgttgaggatgttctgtggtgaatcacagagcctcgtgaggctcgtgggatggtggcttgcttttcccatttgtgaagtctggtggtaacagtacccagacagggaagtgaacaaccctatagtatagtgaccggatttagcagggccggatcgccaccatctttaggaaagtcaggttaaaggaacataggagcggtgaagtctcgtggtgccatgttctaggttaggtgcatatcgctagtcgtagtgtgtcttcatattgcaaattgctttgtttaggagcgagaactgttaagccaygcttgttaatagcctctggagccagtctgcctgggttcagtgtttggctctgccacctcctaggtgtgtgaccttggcaagtttttgaacctctctgagtttcagtacctaaaaccagcgtaatagtagtacctacctcagagtccgtgaggatgacgtaagttaatatttgtgaagcgcttagactggtgactggcacgccatcagtgttgtataggtgtttgtaaatagatgaaacagaaccaayattgcacgtacatgtattcaaaatatattcaagatcagattatccaaataccagtaaggtgttgaaaacagcgcttccccccctcctcccccttccctctccctgctttttttccttgatctctgcaatgtgcccaacccccaagtataattctgattggctaaattaattctgcagcatcctgctgtgaataattatgttgatccagtgtgtatctcatgcctttttttttctctttgcctaaattataatgtgacaattgcggctcacagctggctcatcagaggtgggcagttgggggattggcacatctgactgtgcttctctgttaactctgtgccttgattgcttaagacaagacacatgtaaaccccatgattattgccatttttttggactttgcaaagactctgccttcaaacataaagctgctgggctcgttttggggtgaggttgatcactgaaaggtaaaccactgcggtattgtgtttattgattattaattgatagagatattatgtcctgcatctctacattcacatttgattattttccagcttgcttgatctctccccacaacatggctttattgataatacaccccttcttcttcttttctttacttttcttttttttgacacagtcttgctctgttgctgacgctggagtgcaatattaccacccctcctcacatcaacctctgcctcctgggttcaagtgnnnnnnnnnnnnnnnnnnnnnnnnnnnnnnnnnnnnnnnnnnnnnnnnnnnnnnnnnnnnnnnnnnnnnnnnnnnnnnnnnnnnnnnnnnnnnnnnnnnnnnnnnnnnnnnnnnnnnnnnnnnnnnnnnnnnnnnnnnnnnnnnnnnnnnnnnnnnnnnnnnnnnnnnnnnnnnnnnnnnnnnnnnnnnnnnnnnnnnnnnnnnnnnnnnnnnnnnnnnnnnnnnnnnnnnnnnnnnnnnnnnnnnnnnnnnnnnnnnnnnnnnnnnnnnnnnnnnnnnnnnnnnnnnnnnnnnnnnnnnnnnnnnnnnnnnnnnnnnnnnnnnnnnnnnnnnnnnnnnnnnnnnnnnnnnnnnnnnnnnnnnnnnnnnnnnnnnnnnnnnnnnnnnnnnnnnnnnnnnnnnnnnnnnnnnnnnnnnnnnnnnnnnnnnnnnnnnnnnnnnnnnnnnnnnnnnnnnnnnnnnnnnnnnnnnnnnnnnnnnnnnnnnnnnnnnnnnnnnnnnnnnnnnnnnnnnnnnnnnnnnnnnnnnnnnnnnnnnnnnnnnnnnnnnnnnnnnnnnnnnnnnnnnnnnnnnnnnnnnnnnnnnnnnnnnnnnnnnnnnnnnnnnnnnnnnnnnnnnnnnnnnnnnnnnnnnnnnnnnnnnnnnnnnnnnnnnnnnnnnnnnnnnnnnnnnnnnnnnnnnnnnnnnnnnnnnnnnnnnnnnnnnnnnnnnnnnnnnnnnnnnnnnnnnnnnnnnnnnnnnntcattactattattaagggaaaaaaataaggatttggtgtgggtggcagtaggacgggagcgtgtcctccaatttgaaatctgtaacagtggagaaaatttgtaaacagaccgtatatttatgtatttggagtatatactttcagtacctactacatgcaaacagtgcgctgtagtcactgcagattcagagctgagttagaaatggttcctgctgtccaggagtgtgtggtttggaccagaacaaaacaagcatgaccacataaccctagagcagcaaagaatggtgcgatcgtaaaggaagaacccatatttgctttgggttttttttcccctagctatttgggtgatgttagagtaaactgaggaagagaagagagagtgaaggtttaatggaggaggttgtatttgaagtgtactttgcagtgtgggtagaattttaaacacagaaataaaagaaagacatccccagaagggtgaaactgtgagcaaaagcagggtgaggtctcgtctggccagaggttctctccctgggatgctcttgcatcggtagagaactgtgagtaaaacagctgctgcctgaaatccagacacaggaagcaggtgagtggctgctgagggccgagggctgggggtttcgaggaaactaggagtggctggatgcaggtaccaggggtattttgggggtgatgacagtgttctgaaatggaatgtggcggcggttgtacaactttctgaatagactaaaagccatcggattgtatactttaaatgggtcagttgtatggtatgtgaattatatctcagtgaaggtgttatttwaaaaaaaaatactgctgcatactgatgaaatcacactttctgggcgtggcgctggtctgagcctccttaggagccctgggctggagcagacgctggacatagcgttcagctggaaggagaggtggggctttatcttagcctggaagggcttgctgaaaggtttgcaaaacctatttgcaaaagggagccattggaagttttaaagtagggtcttggcacattcacactattgtttaaaaagctactcacagacctgtggtagatggtttctggaagctgggacgccagctggggccttgttgggttaccggcagaggcgaggtggcccttcccaggtacagatgagtgccggttgcagtgagagtcgaaatcaggtgacaaatgtaagggacacagagagcagaatgtcagcagggcccggtgctgtctggatgtggcacgagtgggagagagggtctgacgggtcctcaggtttgagccagagtagatgagaaggagcaggcctggaggatgtgacatgctcagtgttgcatgtgttggattcaaggaaccggcgatccatcctggagcaagatgggaatgtggctctgaccccagcaaaggggctggccaccgagcctagggagtgtggagggtcagcttccgcagcagctcagtcatcagctgttggcaggaggcctcagaccttcaccacgtaggcctcaccacctctgtccccatgtcctcacaacgcagtggctgacttctcccaaggcgtgtggtccaggaatgagtgaaagtcacagtgtctttatataaccctgcctgggaagtgacacactctgtctcctaygggtgacgccaaccaaccgtgtacagggtagaaggggtcacacagggcatgagaacaggaggcaggggccatggggctgtcctggggacagtctgccacctcttgatgcctggcactgctcttggcatggccatctgcatggaaaggctgtaacgagaagggtgctcaaccaccagctcacaggcagggaagcccatgctgcctggaggattcctgcattctcctagcatctgtggcaccccccacgtcccaggggctcggagacaggtcaccgtttctctggactgtcactccagcgagttcaccgcccttcgactctgagcagtgcagagaccccggaccacaacaaccgtgttcctcagactgatgcgaaactccaaagagcgggaaaacgactttagagggaccggaaaggggaagcgagtctcccatggtttgaggtgttgctgcccgtacctgtgcacttggccacrgtccaaagtgactccattgcgggcacagccgtggggctgacgtgagaccccagcctggcaaagcgagcactcggaggcagtgggcagaaagggctcctctcggctctgcagccggaaaggagacatctttttagataagagttacagataatattctatttctggaaacgcaaggatgggtgggatgaaccttcttaactaatgtgatccattcagaagtatgttaaaatgtatcccttcatataatgcaccctgctttaatttttagatcagggctgaagagtttttcttttttttttttttatgagaaagggaaaatgttgtttttaaaattaggaataggaatttaggccaggcacggtggctcatgcctgtaatcccagcactttggaggctgaggcaggcagatcacttgaggtcaagagttccagcccagcctggccaacatgatgaaaccccatctctactaaaaatacaaaaattagccaggcatggtggtgcacatctgcaattccagccgcttgggagtctgaggcaggagaatctcttgaacctgggaggcagaggttgcagtgaactgagatcgcaccattgcacttcagcctgggcaagagagtgagacttcatcttaaaaaaaaaaaaacgggaatttagttatatttaacaagtaatcattttgggaggccgaggcaggaggattgcttgaacccaggaggtcagggctgcagtgagccaagatctcattactgcactctatcctgggtgaaagagtgagaccctgtcgcaaaaaaaaaaaaaaaggaaactctgtctcaaaaaaaaaaaaatcataacttgttgagaagtaattaaagacatgcagaactggagaaggtaggacaactccgatgagtccgagtgaggggtggaggatctggcgattgtgtgtgtcgctggtaaatttttttttttttttttgagacatagtgtcactctgtcgcccaggctgggtgcaatggttcagtcttggctcagtgtaacctctgcctcccaggttccagtgattgtcttgcctcagcctcccaagtaggtaggattataggcacatgccaccacacctggctaacttttttttttttttttattcgtagttttgctctcgtcgcctgggctggagtgcaatggcacagtctcggctcactgcaacttccgcctcccgggttcaagcaattctcctgcctcagcctcccaagtatctgggattacaggtgcccaccaccatgcccagctaagtttttgtatttttagtagagatggggtttcactgtgttgaccaggctggtctcaaactccgcgasctcaggtgatccgcccgcctcggcctcccaaagtgctggggttacaggcgtgagccaccgcgcccggctgagaaattctttatgcaacttctgtcctgctgccctccctgcccaggcccctccagggcctgtgctgattgaagggagaaggtcgcaccttattacaacttacatcgccacctcgtgatacttgccaatttcccctttttgcagagagagaagggaaacattgggcaggctaacgttttaataacattgtttggttttcactgtattaattgtgtgtctaccttctgtctgtggacagtcacaggctgtccatttgtagtggtggtatggagttctctttagaaaataaatgcatgtacatatagtggtttccatgaaatacgtaaataatagcacagttggcagaaaccacaaaggtggtatggaaatgactaatatttgagaagcactagtttgtggcacatgggacgrtatatttgtgctgtagggcacagcgctctgagctcccggagagcagattttataaacactaaggtggttttttttttttttttttkgccaactttatctgtcaatttacaaatagttgctggtaagtgctgttttttcctcctgaatttagttaaaccaccaagggaggctttcttacactgggattgcagttgctctgttggattggggaaaaagtgtcctaatgacccaggaacactttaataaaaaggttcagttgaaactacaggaatgccgagagctgactgaaaatgcagagaagttctaagggggtaatcggcagtgagggaaaagtacagtgcctcgtggcttctaggatgtcctttgtcctatattctcggctcttttcaaattgaaggaagtgggtgagagagatgctgctaattacatctatgaataaagtgacacagtgcaccggctctgagcagagaccaacacaactcgagagagaaaatcagtctgtcatatttgtacaaatatgtgcacttcgatgataattaccatagtcattgtttactattgctgcattatattaattatctattcagtgatattaaatacataactctaaacatcatccccgaacaaattaccttttatcaattgaaacaaaccaattaaaaatttcaaaatgcaaccatgtaatcaacggcttactacacgataattatgaccaaaatgccaattaatgtgttaatatatgacctcaaatctacagaaacaaacaacaaaaaaaagcagcctcacatagcaattatggcctcgtttgattgacagatatctgtgggtttgtttttctgtctgactcggtaatttgacttatatgaaaacagccggcctgttctgtcccgtgttctgaagcctgttctttcccgtgtgtgacaagcgcgcaggattaaaaagcacagccttttctcttcagctcctgcatgtcccttccctgcactgcccagttgcatccctttccagcatcgtttctgctgctcttgaacctgtggagtgggaagcaagacagggatctctcattttatatatcagtaaggtgtggcgtggacagacccgtgtcgctccctggacaccactggtggtattgattttatggagcagaggctggtgcatgcatgtgtgtgtcaggtgggcagtgatgggggggtggggatgaggcatggtgataattcacaacataccctctatctagttgggatccgtaaaggaggaggttaggggagggaggatccatgcctacttgtggagggtatcaagaagggcttcctggggaggtggaggtgagccgagctcaccaggagcttcaccttcctggggaggcgcagtgagccaagactgcaccactgcattccagcctgggtgacagagcgagagtctgtctcaaaaaaaaaaaaaaaaaaaaaaaaaaataagggcttcctgtaggaagcttagtcagtggaaaggatttagagaggaagggacaggaaatagagaacagcaggccgggcgtggtggctcacgcctgtcatcccagcattttgggaggctgaggtgggcggatcatgaggtcaggatatcgagaccatcctggctaacatggtgaaaccccgtctctactaaaaatacaaaaaataaaaaattagccgggcgtgttggcaggtgcctgtagtcccagctactcgggaggctgagccaggagaatggtgtgaacccgggaggcggagcttgcagtgagcccagatcgcgccactgcactccagcctgggcgacagagtgagactgtgtctcaaaaacaaaacaaaacaaagagaacattctagcaggagaaagggcgttgagtgcttgggttgggtcaaggcacaagtctggctgaaatttagaatctttgaaggaaagcgatggtgagattatttagactgggaagatgaacctgccaatcttatttcttattctgcgtgtgtcacttgatgagaaggccatgtctccaccctttagtaaaggccaaggtcatttaaaaggttacctggcctttttaagtgacttgaaatgtttagcacagttttagaaggtcagtgtctcaccacctgacccttatttccttggtttatgatggccaatttattgcgtctgttttattcaaaagaaaactgagggtgcttctraagtagtttcttatttcaatgtgtacacacctccactctgaaacatggctcccttaactgcacaggcaaatttatcacatgtagttgtgaacatatatttgtgtgtgtattgcagtggaaaatccccttgaaaaatcagcaaattggacttcagcttgaaaagtatagacagagaacaaaactgtctgtgtgcaaatatatgtatatgtgtgtatctaaaaacatatataaacacatgtatacgtatgtatatataaataaaattggattgagtcataaaagtataaatatgtccaatgtaaaatctactagagaaggagtttgtttttatgactcagagggaatgtgtaataaagaggtatttttaagaccgagagccagtgtgtgtcagcttctttttgcccattgtttgtgtsctkggcaggaagatgactcactagatctgaatcacaaggcaattaagagccccaggaaaggctgatttcaggatggatatttagaagcttcagctaaatcaggtcttgggtatctaggtggattggggaatcagtgaaacaaatatttctcttcattgttttagattctgtggatctcttgctcagtacagaagtactttttttcccccaaaaaatcatatgaagaaagaggaagcgctgcccattctgaaggaggttgttaaaaatgagtaacgcacacttcatgttcacagcagcagtattcacaatagctccacgtgcccgttgacaggtgaacaggtagacagaatgtggtctatctgtgcaatggaatagtattcagccttaaaaaggaaggaaattctgtcacttgctacaacagggatgaaccttgaggacatgatgctatgagaaatcagccagccacaaacagacacatactatgtaattccactgagtcgaggttcctagagtagtgaaattcatagagacagaaggtagaacggtgatttccaggggctgaggagaagaggggatgaagagctgctgtttaaaggatgcagagtttcagttttgcaaggtgaaaaattgctggagattgatcgtacatcagtgtgaatgtacttaccactactgagcggtacacttagaaatggttacgatggtaaatttaatatgaggtgtctttcaccacaattacaaaagtggaatgagtgaagcttattaaggatagacagcagatggctgagaagttggcctggctggaccgttgtctgsggggagcatgtggatgaggcatgaggtggggaaataaggaacctgtctttcttccagttaattgttctttcccccttgccttccaccttcctttccctcctgatggctcatcctgtctccctctcacgtgcctgctgyatrctttcttccttttccctgctggtccacccgacctatttttactccctcacatttggttgtctttatcctcggaggagaatgctcacaccagcgtctttcttcaggacagctttctaccttcctttttttttgccattttaagaccgacagtggcataaggtcactgggtgaggtagagatacactgatctttttttggtggcagttagggatattgacattggtcatttsccaaagcgacagcagtggtagcacaggtgagggtgtcgcccaccgtctgagaaacccatgaagtacgctggctgctcttccatgttgcccccttcataacaaartgttcgctatcacgttaagaaatatgttcgaggaggaagccgtgcaacagcttcagaaaaaaattctagagctagaacatgcagttggttttcaaatctcatattcttaatttcaatccttttatttcggatccaggctttaggatgcctctctctctgatatcactaaataaaaattatccaaatgtttaacattatatagaaataaacataatggtgtatttgacaaaatttgacaattttcatgtggatattcaatgccttgtggtcaaagtttaaatcaaaaccaatgtggtcttggcttcaggaatctgtaccatcatagatagcagtggagaagaggaaataatagtctggtatccttaacccataatatagattgtatatttgttgaaagtagaatgcaagggtggcaaaggcctgatcttgttgagggatgggaatttgtcaaacgcagtcactgaatctgtgtggtggacacgcgtgcttgaaaaccttgcggaagagtagccatcaaaaatacttacagttcttaccaaggttacggcagggcaggggtgctacccaataaggtagcacccaaatcggcttcactgcttcaatacgatggaaggctcaaggacacatttgtggttttttttttcttttctttctttcttttttttgagactgagtcttgctctgtcgcccaggctggagtgcagtggcacaatctcggctcactgcaagctcygccttccaggttcatgccattctyctgcctcagcctcctgagtagctggtactacaggcacccgccaccacgcccaactaattttttgtatttttagtagagacagkatttcaccgtgttagtcaggatggtcttgatcacctgacctcgtgatccacccacctcggcctcccaaagtgctgggattacaggcatgagccaccgcgtccagccaggtttgtgttttataggaagaataaatttccattttaaatgaaacaattctacttttttcttgtgaaataatgttgaagtatagataaaatatatcaattgtatgaagatcatttaaagaaaatcacatgtatattgaaaaagattttaatttttttttcttggaaatagtgatctattgttttaatggaaaaaggaagtgtagtttttaaatgttctttaatattgatttacagaagcttaacattacctttttaaataccacaggtacagtaaaatttaatgggaaagctaatttttaatagtttgataatgtgtatatattttatatatatataggttttaccttgcattcgcattttaagagaacaagcttattttatgattaacagaatcattaaaaattttttattgtaagcttgccagagtcctagatttaaaaagttatactcacaccacatatagtctaatgacgacaataaggataaagaaatactgaacttttttaagtaggcttatgtcggtagggatattgatgacattctgaaactattttgtgtttatttaggagagagtaaatgagcaactaagtgaattgatgtgttggacaccaacattttcactgtggaaggagacataaatatgaggaatgtgaggtactggatttgagttgaaagtatcagtatgaagtcatgttaaaatacacccacgctctctctctcactgttgtggttgtatcaactgaagagcctagaagctgtgccatcccaatacgcacacattctctctctctcacttttctagttgtatcagctgaagagcgtagaagctgtgccatcccagccattatgagcatctctcatgcccagatcttcgtttctgaatttctctttccactagaagaaaccatgagagaaatggcgagcctgagatcctttattgcaccaaaagcaaggaagtatggaaggagagctgagggcttgccaggacattggcygacatggtctctcactggtcaaacttgggatggttggaacatcaataaagaatattaatgatcatggattataagtacattaaaaaaacccatatgagtccacagtgatgagagttgggctggagcagggaggggaaagctctgctttataggaacatgccagataacaaatatagaaggagttagagaattagaaactcctcatgttataaccttaatgtaatcaactgattcaggatggatgtgaaaactattggatgagaggctgttgatgttagcacagtattctctgtgcttttgcaatgtagagattggccgtgaccttaatgaagtggtcaggtttggcgtcactaatggtgggagtcctgatgtgatgcggtaggaggatacctgaagcccctgggaagagtggcttcgatgctgccaaggagaatgtcatgaagtacagagctaagtgcaggaactgtttcagattagggagaccaagcagaaataacagccaattgcagtgaatgaaacttggtcggattccatatcgaaacaaacaaaatggctataaaggacatttttgagacaatcggggaaatgtgagtgtggactgtatgttggatgatggtattgaatcaccctttccttttttaaaggtgtgactggataggagaaggtgtttattcttgagagatgcctkttggattacttagggtgaaatttcacaaggtcttaagtccagttttggatagtttggtaaaaggaaagcatgtgtgtgtacgtgtgtgtatgagagagaggggatttgagaagatattaattcttggtgaatgtaggtggagagttatcagtattcaatgctatatcgtttgtttctgtaggtttgatatttttgaaaataaacaataagtaaaactaagtggcatagaaattaatctcttcttttcatatggacacatagagacatggtgctaggatggcatgtgggaaatagtttctgcaagatgagcatattcttcctccactgcccctaccagagaaatgtgaatgctgattcacttcttttgaccagtggtgatggaatagaattttccagtcatgcagttgtacttattkccttctggttctgtatcgataagcttcattcctttttttttttttttttagcttcattctttagaaattggattctttacttagtcaagtctataatcaaaatagactttccatggtaagtaaagtaacatgggagcgcataacaatacctgtcatttatgaagacctactgtgtgcttggcactgtgctgtgcttttatttaagtcttctccattcttcatcatccccacattaccaggaggagacaggctcaggatgacaagtggcttttgcaaggccgcgtggtgaatacatcgtagatttgaaatttaaacccagttctttctgactctartttacctatatgttcatcctccagtatcatgctacctgtatgcctggaaataaaccattttacatagtttctaatgggattacatttttaaaggaaattcatggtagtaaagatctcgttaacactcccttgatgtatggtatttgagtttaagtgtgaaaagaagacactagcaatggacttgtactgagattcaggaaccctggcttctgcttccagttctctcactgtctgatggtgtgatttgagggccttagtcttatcaaatataatcattggttggtctggttgatatctcagttaatttgggaaactaaaatagcatgacattttcaaagaatttttaaaaagattactgtggcagaagcaagttctgggggtggaggtgcatgaggagggcttgggatagtgggaggtggctggagtaggggctgggttattaggggtctgtaggcaatgttagggcttccaactttgtaaggggcaatgaaagttctcataggttttttacactctaaaataataataataatagttctttaatatcaaatatgagagtcagagtcaaatttccctcatttatactttgttcaaatcaggacctaaagaaggttcacacattgcaattgctgataggcctctctccccctctctctgcccgccctcttcttctttctctctctccccatctccctgtctctctcttcccttccctctctccatccctctatcttttaataacagctgtattgacatataactcacataccgtacaattcatctatttaatgtgtacagttcaatggtgtcttattccattgggctactataacagaataccatatactgggtggcttatatgcaacagagataagtttctcacagttctggaggtggaaagtccaagatcaaggagccagcagatttggtgtctgatgagggcmcacttcctgcttcatagatggcaccttcttacggtgtcctcacatgctggaagggcctcttttataagggcactaatcccatccattagggccccatcctcatgactgactaataacccccaaggctccacctcctaatactgtcacattgtgaggaaagatgtcaacatctggacttcaagaggacgtaaacattcagaccgtagcaaatgggtatgaactgcagtcagacagttgtgcaaccatcaccacagtcaattttaaaacgtttgcattacctcaaaaagaggccccatagctgtcagcagacattcctcacttcttcccaacactcccccagctatcggcacaataatctactttctgtgtctatagatttgtcaattttggatactttacataggtggaatcagataatatgtggcctattggcttctttcactagcataagttttcaggattcatctgtgttgtagcatgcatcagtgcttcagtccctttgattgctggtcatcttccattgcatggatgtatccataattgtatggagacaccacattttatgtattcatcagttgacagacatttgggttgtttctactttttgtctattgtgaataatgatgctgtgaatatttgtgtacagttttttttgtgtagacacgttttcctttgtcttagatatgtatctaggaatggaattgctgggtcatatggtgactctgcatttaacattttgaggaacttccacactgttttctaaagtaggtgtgctatttttcagtcccacctgcagaggattccagtttatccacatcctctccaacgcttgctgttgtctgtgtttttgattatagccactctactgcgtgtgaaatgttatctcattgtaattttgatttgtatttcaccaatagccattggagggttttagggatgaaatggcatgatctcatttagattttaggaagatcactgtcaccgtatcaaagaggatggatgagagaggtgcaggcagattaccagataccagatgatggatggcagcagacaggccaaggtagtggyagtaagaatggtgagaagtgagtggattacaggggaatctagaaatactgtccgtaagaatttgtgattggtcagatgtgaggattggggagcgctgaaactgcatttcctgcctgggcacctgcgtgaggccatccattgacagaggggacagagcagggtgggtagtggagagtggtgtgtgcagatctggaggggttgagtttgcatttactatcaagagaggagatcaggagtggtctctgggctggaggcagacatttgggaattgttaatatrtatcagcagtatctccagaactgggaatggctgaggttggagagtgagaggaaacyaggatatttgagcttacctcttacttctggagctttgtgatgcttttgcccttttagaaaaatgcatggaagtacagttttttactcaatatggaatacagttaaagaacaacatttccttcactttattgaaatttgttgcaggataacatctctgtcaaagcactttacaaggctttctagtaaagtaaattttttgtgtattgcagtggggagaggggagggggttgcctcttgtaaggcagaatttgattggcattatctcttaagtcttcatttccagcaacaatcttaacatgctgtttagatttaaatggtgggtggaccatatgtcatgaagaggtacagtgatagaaaacaatctctaaatatctaacccatttaagtggttcctacaggtttttatgtttttgagatacatgcctaattttggattattaattcttactggaattttgtctgttaagttaggaagaaacgacttataaagtttcctttggttttccccaggaagatacttttataacatgaaatctttaaaaaaccctttagaaaagtggtctatataattcttagcagggtgttgagatcaagtgcttttcttcttttcattttttacactttgtcagttgaagatgtgcaaagaagtccatttgaaatttccctcgggccacttaattcagcttcattacagtggaagtgggttaaaaatgataatcatacagccccaacaggtgattagaaatatagataggatggggccaggcacagtggctcacacctgctcagcactttgggaggctgaggtgggcagatcacgaggtcaggagatcaaagaccatcctggctaacacagttaaactccgtctctactaaaaacacaaaaaattagccaggcgtggtggtgggcccctgtagtcccagctacttgggaggctaaggccggagaatcgtttgaacccaggaggcagaggttgcagtgagccaagatggtgccaccgcactctagcctgggcaacagagcgagactccatctaaaaaaaaaaaaaaatctatatagatctctatagataggatgaatccatgacacgtccttaaaacagttttattttttccgtttcatgaatttagcaggaggatcctattctcactgcaacctctgccacccaggttcaagcaattctgcgtcagcctcccgagtagctgggattacaggtgactgctaccacacctggctaatttttgtatttttagtagagacaggatttcaccatcttggccaggcagatcttgaactcctgacctcgtgatccacaccccttggcctcccaaagtgctgggattacaggyatgagccatcgtacccggccgagatttcatttttaaaaaacatgaatccaagaagtgacttgagttccaaataaataaatttataaatttacttatgttctagaataaatgcaagtaattatgactgcattagtgcagcattaattaacattgctaattctttgtaattatgccaaataataacactaataaaatgtaaatatcaaatgaataaggcgagagcctcccctcctctttttaaagccactatattacagtgtcagattatgaacacacaatattatcaagcttccagatatccactttctaaatacggtctgtgtgaattctaatgaaaacatcagctctgtggtataaatctcctttgccgcctggttcaatgaggggctgcccagcaagscaataattccattcctcagagcattgctgagaatatttatataattaaatatcatctgtttccccatttaattcctggtggctatcccscaaccccctggctgtttttgctgtttccttgggcaggaatggcrcaataaagttgctgcagtgctgatggattatcttcattaggtacttgggtgatgagtccccaagcactgctgaatttgatttaccctgtgcaaaggcccaaccttccatagaagcgctaagtagggcaggttttatgcagcttgaactggttggtgtgaagaagaaggaaaaaattaagttgttcttctagaaaacaattttgggaaatgctttggtctcttaggagagcctcctttgcctccttttatacaatctcaacaaatggtgatactgaaagtcctttttggtaagaagaggcggatgaagtgagaacgtggtgagctggagagaatgcaggagacccgggttctgcatctggggtcagagctgaagccaggctgaccttccttgggtctcggggtgtctgcatctgggcagcgatggaacaggactgtggctctccaaggccacttcagctttggagtgggaccttcgtgaatcccgccctgcccctgatarccatgggccctgggcaagtcaccccatctctccccgcctctgacactttgtctttaaaatgggaatacaccacttgttttgcccacttgttacagggtggtccggaggtctgaatacragagcgcactgcatggtcctgtgcggatcccagctcgcagcaggtgcccacaggacgccgcccctcgcttccctcatgtcctagattctgtgagacacagcccgtgacactttgaagcagggccgtaggaattccgatgggaggtgattagagagaataaacaaagtgacggagttgggcctgagacaggggagtggtctgcggtggaacagtgctggagtaactcctgccactctgagccaaggctcttatttatttttattttggacagggtacttgcagaatcaaggctttgggagtctggtgagtggtcagacccttcatgaatgggattggtggccttataaaagggactccagagatgtctctttctctccttgcaccatgggaggacgaaatgggagtctggccatctgtagcccagaaaaatgttctcaccagaacctgactgctaccacgaagggtgtttaacctacattgagtgccaactgtgcttctcctttaattcaaagcctttgatttctgggggtgcctgttctgatggcactgatgggcaccccctgttgagtggggcaggtgacgggaggaggactggcggccgtcagtgggggctaccatgggggtccagggggcctgtcaaactgtggcacaggggaaacccgtagctctgtgccttactattttactataccatctcatttagtgcccacgatttcttaagaggtaggcactgaaggggaaayctgtagctctgtgccttactataccatctcatttagtgcttatgattccctaagaggtaggcactgaaaccattaccatttgtagatggggaaaccaagggtcacagtggcttgcccaaggccacacaggtcataggtgggagaactcattggagccctccccgcctcagccacgacagtcgtgtgtaaaggtgggttcacggaatatcatggggcctcctgtggtcttaaagtttgcacctctccaaattcctaggttgaaatcctagcccacaaattcgtaagttagtatttggggagggggctctgggaggtgatttgttaygagagtgcgaccctcatgaatgggaccaagagccttagtgcctgcctgaaagggacctctttgcaccatgggaggacacaatgggaggttgaccaactgtagtccagaagcgggcttgtaccagagcctgaccatgctggcaccttgatcttggacttccagcctcagaaccatgagaaatacacttgtggtgttcataagccacccagtctgtggcagttcgttatagcagcccccgccgactcagaccacgctgtaggatttgaagcaggtgtgctgagaatgtagggtagacatgtcatggtggccggtcaccttccattgtcttctctttctaaacggcacccaccttatgggctgctatgagaaggaaatgaggccagtgtgtggactggcgcacccactgttaatcagctgccgctgcttggcccgtttcatctgcccggaggccgttcctcactgacatcagctagtcattctgcccttcaccttgggagggcatcacaccttgtgccttcgtagagaaaaattcctgtttctgccccacgctggaaagtcagataaagccagcacatgtctggaagatgcaagatgaaatgtgaaatcagtatggcattgggtggaaacagaattctactgcacgataatgacagccgagatcaaaggaccgtctatttatcgataagagtgaaggaaggataacatggcagccagaggcgtcatcaaaggggaggatggctggggtaagaccctccaagggggccacaggccctacccagatggacaccgcatgctggtgtggcagacgagggcacagaccagtgtggcccctccgccctttgccccagtcggcattgtcggctgttgctggcccacagctgaacatgctacgtgtcatctagaaccagcctttctgtctccatattctgagtccacaagggacagtaataatgttgggcccacccctggaaatgtaagaagaaattctcttagcctgtcttatcttgtacttgattctttaggtccttctcttaagtttttcttttctgttctcctgttaatctgtctttctttttaaaaccgcatacttacacagctagcgttttattgcagaatactacttttaactggacctaaagagaaaagtctaaggtgttagcaggtatcattctcaccagtcatgaacgattgccattcacagtttaatgttatcctagtcttatctgtcctgacctcatttcttgattaaaatgttcctgttaaatttcctgtaaatccttcctaggtgaaaaatccctccgagggctgcgtatcgcctggggctgtcgtgtattttggcagcagatcccttcccttggctgctggctgggtttctccaagctaatgctgttcggtgcaaaggaatggccctcgttagcttcctgagctttttagaagttttaggctgtgctggttttgaccccttccttcctctctaggactcctgaataggccgaagaaaaaattaaatatttaataaacaacccaatgtcacagagaatgggaaaactcttgggattacatacttgtacccaaatcctaatagactttttatgcttattgttaataatatactatatttgaaagcagagtataatgcctaggacgtagaaggactttaaaaaatgttagtttcctttccctgtagaatagtcaccctcaaccctgggctgcacttaaaaatcacctgagccagtggctcaagcctgtaatcccagcactttgggagacctaggcggtggatcacaaggtcaggagttcgagaccagcctgaccaacatagtgaaaccctgtctctactaaaaatataaaaattagcctggtgttgtcgcagacgcctgtattcccagctactcaggaggctgaggcaggagaatcacttgaacctgggaggtggaggttgcagtgagccacgatcatgccactgcactccaccctgggcgacagagtgaaaaaacaacacaaaaaactgtattgatgtctgggctgcatcctagaccaattaaatcagactcttggagagtgaagtccgggtgttaatattttaaaaaggctccccaggtaattctaatgtgcggcctaggttgagaagatcagctcttagaagaatacagctggccgcctttttgctttatacgttttgagctgctggcttctaattagagttaatatcattacaatataatgcctttgttttacattaaatttaataagaacaaccactctgctctccaacaatatagctactttctctggcttaagtgcttctattctttttttaaaaaacaaacaaacaaacaaacaaacaaacaaaaaactgagtttccgattaaaaacccaagcttaggccagaacagaactttkgaactgcagtcaaacaaaattttagataattgttttctaatggcttcctgacaaatggagactaaagacaggcaagggggctaagaccaggctgggtggggagaggggacagcagcacgttggtacctgggtcacctgccagaaaatgagtggcagtctgtgcccaggtggcttcaatttcctgataaaatgaaaaagccatgatatctctgtagaccgagtctacgtcctaacccccaaatcaggacacatagtcttgtaagtgggagagtatacacgtggacattgtagctggaatctgagcctcagtttccccatctgccaattggaggcattgcagagtcctcctcaggattgcagcacgggtgaaaagcttgctgacaaataaatgcttcctatgtgtcaaacaccattctcagttttaaaacgtgttaaataactctgtgagcagttaccttatcacctgtcttatactgaggaggaaatcgaggcacagagaagccaagcagactggcctggtccctggaatagctgggatttgaacttggcagtgattccagagtctgggcgtaaaacatctgtgtccagtgcacaaggtacccaagaccgtgtgggcacaggatggaccctcaaggcagcgaatgaaacccggggctggtaaggtcaaaggtgtgtgagcagcagtgatcccagcttcactctggagagccagggcagtctcacactgggtatgaggtgggtgggtatggtagtggtgatggtgttggtgacaggcttctttagaagttttggagcttttggtttctcaggtagcaggggagaatgaactcagaatattattaatgaaattatctgtaaggttgaaatgtacaggagtgcattttggcataatggtgtgtatgtgcatgtgtgtttttgtgtttgcataactgcatgcacgtgtatgcatttgtatgatagtgtgtgctcatatgtgtgtatgtgtttgcatatgtctgtgcgtgtgtatgcatttgtgtgactacatatgttatatttacatgactacatatgtgtgtgcatgcatatgtgtgtatgtgcatttgtgtgtgtgtgcatatgtgtgtgtgcatgtgcatttgtatggggttgtttgtgtatgcatgtgtgtttgtgtgttggagaattatataacaagcgactttgtctcattcttcagctttgcattctgtgggctggggatctgcatttttccctccagcctcttgtattacccaagctcactcattcacttgatcatacttttacaactctgtgacatttttaccatcttagctgggcccttgcttgttggtggttttgcccatttctaggtgtgtggcctccctggccctcatctgtcagcagagcccatggacttaccccagaattgcaaccctggaagcatcttagcatcatctgggactgatgcccccatacccctaattaaatcaggccctctgctcgggagccatgatgggtctagtgtattcctagggttgagaaacaactggctgtattcacccaacctatgagaagaggatgaggtgacatggagaagtcagtttacaagagctggagcaaagtgcagagccaaatatcttggcgctgggctaatgatgcccttttcattctcccctcttcttcttccctcctctccattctcttccaacactgcttccccaggtcccctctcccatgccaggaattaaaatgttttgtctggaaacaagtgagcttgactaacgtggccgggctcccactgcagctgagttctgcatgttctgatgtyagtgttgtgagctttaactggagattggtgtccaaaggcagccgatactgctctgtccatttctrttgtgctgaaaatcacatggaaaccaatcacataatgatcttgggaatgaagtattcaatgcacagtgttattaacatgtaaaagacttagggcaaatcacttttaagtatgacaaggcttcagatgtgtttggtttgagtatagggaaaagagtttggggggttgtttatcagcagtgccatgagggaggcttatttcttccctttaaatctggatgaatatgcctgtgtgcgccgcatgataataacaatcacgccagccaggagattagctgagcttttgctctagtaattctagcatgcaaattcaaaggactgcagaggaggcaggggaggagcgtacttagcatcttttgctcccctacatcctaacctttgtgctgtgtcttaggttcatcttagggacggctgaacgtgaaacctccatgatgtcaaaagcctggagagttgggtccatgcatgaatgctgatccactttctctcatagtgagatgtacaaacagaagggtacataaaacttaataattatagaaacccatgtaactacccccacccctaaggaaaaaaacattgccactgccctagaaggccctataccctgatgttatttaagaaaatggaccgcggaagagaggcacatgggtggccaggaatggagaagctctgttaggacttgggcatggcacttcttgactgtttctgatctttatgaggcagtagggattctggaacccaacagtttgggttgcaatctcatctatgttacttactagctttgtgtccttgggcaagtccctatgctccttgtgccttagttttcctatctgtaaaatggagataataaaagtrtctaccttgtaggataattgtgagcatatcaagtgtgttaatacatgtaaaatcattaatacagcatcaggcacatacatgttaactactattactttattaataatcttggttctaaaaccttgtgttgttttatatgtggaattcccagtcttctaaacagtatctctctctatagatgactgtattatcctggtcttccacgtcgctggtgtgctatcatccctggccaactcagatgtcactgggcatctccagcacagccactgttcttccttccactccatgcagaatgtggcagcctggcacacaaataatttttaataaaattttagtgtataaatgtggtttttggaaagtagggaggagggaagtagcattgatttaatatttaaacagtaccatttaaacctagtagcaaaacccctatacgataatgagttgtagtctattttacagatcaagaaartgaagctcagagaagggaagcaactggcccaatgtcacatagctagtaagtgactcagctgggattcgaccacacttctgttttcagaagtgcccatcccttgcggggatttgagctctcacagcccagcctcccatccttgcaggaatccttccttccacactcccaaaaactgaccatgtaggcttcactaaagtaaatcataaatttggaagtctaggacatcttgaacatgctaaatatgtatcaatacacctgatatattgtttccagtcacagataattccagttgattttcaggcatgtgtagatactcatgatataaagattgagttgttactaatcactatgaggcacgggcaggtcttgaggtagaacctcatgaggggaatgttataagtacttttgcattcgtatgattttccccataaccttctctcatgctggcaggagatagctctcttttccaaattctcaagttggcacagttatgaaaaccttctaggacatcagtgtgatgatgtccagagacaggggcagactcctgatctgtggctgtgcttggtactccctcaccccttcattggtctaatgggccagctgaagaatttacacaataggaaaattggccaaagccttaacattgttaccaacctgcatttcttcatgaagaaagcacaatacttgccttaactgagggaagtttcgcaggaaggggtattcagctgtgtragtatgtgctctgattcttgcctgtttctcagttccctgtgtgttactgccactttcatttattactgtttgcttattttagagctatgtaccttgcaccctgtatgaaattaactcaaagtggatcataaacctaggtgtaaaacataaaaccatcaaacttcgtgaagaaaacattggcaaaaatctctgtgactttgtgttaggcaagtgattcttagataagacacaaaaaccagaagccataaaagaaaatgatagattggacttcataaaatgaaaatgttattcaaaaacattgttcagaaaaatgaaaagacaaatcttgcccatgttcattcccaagcatttcattttgtctgatgctattgtaaatgataccttaaaaactgaaaaattcctaaccattcatcattagtacataacatttgtttttaataattttattttttaataatttgttttaataagttttgtatgttgaccttgtcttctgagacccattaagctcacttatttgttcttgtaacttttttgcccattccttggtattttctttctttctttttttttttttttgagacggagtttcactcttgtcacccaggctagagtacartgacgcaatcttggctcactgcaacttctacctcctgggctcaagtgtctaccactacgcctggctaatatttttttttttttttttttttttaagtagagacagggtttcaccatgttagtcaggtagtcttgaactcctgacctcaggtgatctgcccactttggcctcccaaagtgctgggattacagacgtgagccactgtgccgggccttccttggtattttctatatggacaatgcttgtctccctccaaattcatatgtagaaacctaatctccaatgtgatgatatcaggaagtggggcctcgggagatgattaagtcataagggtggagcccttaggcatggagttagtgctcttataaraaaggccccararagctgccttgcgccttctgtgatgtgagaacacagtgagaagatagccatctatgaattaggaagcaggtcctcagcagacactgaatctgctggtgccttggttttggacttcccagcctccagaattgtgaggaataaatgactcttggccctccatgtctgtcagttctgcatcagtggattcaacgaaacttggatcaaaaatgtttttaaaaaaaacacaaaaatacagtgtatcaaccatttgcaaagcatttacattgtattaggtattgtaagtcatctagagatgatttaaagtatatgggaggatgtgcataggttacatgcttatactgtgccattttatgtcagggacttgggcatcctcagattttgctacctatggggttttggaaccaaccccttgcaggaactgagggacaactatactgttgtttatgagccatccatttttatggtactctgtccaatcagcccaagttggctaagacatagatgatcatgtcttctgcgaataatgatagctkatttcttcctttgctatctcaatgaattttacttccttttcttattgtgctagctaggctctccagcatgatgttgcataggcgtggtgagagtggatatcttcccctagctcttgatccgaggggaaagcagtcagtttttcaccatgaagaatgatgccagctgtaggtcttttgagagcactgtcatttttacttttatttttggcacatggatgggaaggctaaagacttgcaactgactttcctcctatacctttaacattttgctgaatggtagagaaagagaagctgggccagatgtagtctggttagaatgctgctggttgggagtgagtttgaatatgttttagaaatactttgtctttctcttctatgtgccattcctcttagtctgttcttattcctgtacactccctagtcctgaaaaaagtagtgacagacctgacattttaagagcactatcccaatttaaactgtactttttttttttttttttaacagagctttaaggaaatgaacagctctctacattttcttgtatttgtagcaggaattctgatcaaattttcaccttttagtttccgtgagagaaaacaagggccttacacctttgatgataagacatcaagtaactgttactactgagtaaaatgtaagaagaaatatactttttaatttgtcagcattgcccttccctcagtgaccaagttgctgcacatttgatagcacaggcaaccacagcaaacgactgatacggacttacccagttaattacctaaagattatattactggaaaaagctaaatcatcaactcaaccatgtgtaaacactttgaacatcatctttaaaatgtctttgcagtttgtttaggtggtagtggaatttgtacaaagtatcagtcattgtaatagcattctaataattctgttaacaactgcttgaaatcagaaagtattatttctgttgtttagatttgcccmagcatttcttgtgtaatgttataagctgtttatgtgcctcttaatagatgagagaatgcactatgtgaagtctgaagtatctgaagtaggtaatggaaccagaggaacttaggttatgagatgggggtatataggtaatatcccatatatcatagtaataacaagacatagaaactaatatactcactcccagatttccatggggactaggaggagcctscattgtagccggggtcaggaatggcagggtggcagaactacagatgcatgctccctccatgccaatgtgtggaaagggagtgacggacaaaggcagtgggatctggtcacgggagtatgggttggtgtgtgtcaccctgcatggggtatgatactgggctgctacaggagctcatggattccagatcagcaaaggaatgccatttaggaggccttgggaggtgctgatggggttggaggggtggcaaaagccagaaaagatgggactggtaggaaggacatggctcctgggcttcattctggcgctgtctctgaagcttgagcggaagagtccagctgtggtcagtggaagtagcagggcaggggagggggaggcaaaggggacgcaggtttctagcttggaactctggctgatggcagagtattagcgtaggggcggaggttagggaatatgccaattagaccagtaatggagggaatatttgacctaaaaataaaagatagacttagaactcagtcttaagggggcaaaagaaatggctccacttgatattgtaaataccaattggaagttggagtgaacttctaagaatctagggcccaaagtctcccatgatggggatagtggactcaccagagatgggaaaggaggccaggtcactgggcagcagggactcaggttgcctgtagctcaccccttcgcttactcggatcttgattcatttgttgggccatgcataccaagaaccgattatgtgccacgcataggtgctgtgttacaaagatgaaagtgagtcttaaagaggttatgtgtgagaaggggacagatgggaccagtcattctcagcataacaccgagtggaaataaccatgacacagattggagcaaagtgaggaggtgaagcagggagaggatagggaagaagaatattytaggtggagagaaagagaaagcatgtataaagaccatttaaaatagcacacttctggagggccacctttttctcacagcaatctgggtcttacagccctttttctgttcaaagtcttccttaatacaaactgttttatttaaaatcttagtgcttttggttcgactrtgtgatctttagctttacagtgagaaggcggttaaatgccagggcccctctgagccgaaggctctccgtgtctgcctgcagcctttgttctctgccatgtaaaagatgaaaaattgtgtcagcaatatcacacccagttactgtgaaatcaaggaatcgctctggtgaagaatctgggggtgaagaccagacaaatcgaaacgkcttggcgtcatgatttaactttgtcaagccaaagagagggctcgtgtttcaatagktagcctcaccttgcatctatactgggccaagtcttctttccgtgaatcctgaaccctgaaggaatcggcctcctctggctggttttaggcattgcccataaatcgaggctacaactgttctccaggcatctccctgacacctcaaacgtatgctcagcactccttgggccccatgcccaggaatctttccgcttgtctcttttccgggcttgcagccaggctcaacttttcaagatgttgtcttccaaatcctgccttgattaactcaatctgcagccccttctttgtcactgttttcttgtcactcttttggtttctcctgcagtcatctgtgtgcctagtctgtcccatcttaggcatttgcaattgcaaatgactacattaacatttaattcacaccaggcagcatttgtctgctgcataaagacacacctggactgcacggaagactgaggacctgggctaatggtcccagcgtgctgtgggtttggttggctgaggtcagcatccacattgaggtgggtgggcctgggcagatttctaagacaagacaagatgtgaggactcgtgtctacatggtatcttctagcttggaactctggctgatggcaaagtattagtggaggggcagaggttagggaatgtgccaattagaccagtaatggagggaaggtttcggggaaggaggttagaagcagccttagctgtctgcacattccaaacagggatttgagtatttgttcctggatattttggtgagggtgtggagaggtaggagaggggagcctgcttccaactttgtaaagagagagaagatatgaaggacacagatagaggagcttgctgacagctagaaaagagaaggtgagccgagcagatggcgtgcaggtgagcgaaggcatggctaggggtggactcgggatggaggagcccaggaggcttcccgggagcaagtctatgtgtttggtgtcacgcaaccatgcttttcccacaacccttctgtcttgggtcttgtggcactgtcttggttctcttgctgcgtccactggaggcctcttctcccatgacttcccagctcacctcccctctgtgagctcaggccccagcctgcagtcctacgttcttcgcactctctcagcttcctcccctgagctcatccaggcccccagtctctgttttcacccctctggagcagactccccagcctgtctgcagtcttgtccccatccgccctcttgctccatctttcattgctggttagacgtgtctactgctatctctgtcacctccggctcagcgtgctgcactcagacatccaactggaggagtccatgagctgacctcagagatgccctccgacgctgagtttctttgtcaaaaaacaaactcttcactttcatctcttcaaatggcattttattctgtcctctggtgtctgtcaatagatctcatctccccagacaggctgccttcagcttcccttcacagccttgccgatcttgcccctttccctgttaatccacacagccatcacttctgaacttaattcctatagcccctgacgttctctgactcatccgtcccttgtgatctacccgaacatgattcaccatccacatttctggttctactctacctgtctagcccctttcccacaacttttctgcactcaccctcctctactatggccgtcccggtcacttcaccatcttggagcacctggcactcatgagatgccacgatggtcacactgcatcccttccctgaaaccttcccagcctgtctcggtcattccattgttttatttgacttcctctagaatcgataatctctgctacacaatttagcatgtaaccgtatatgctcagtgttccctttttgaagtatattggtcttatctccgcaattggaacatgtttaccctgttggaacatamgctgttatcaagtcacaacgatcattatttttgctttccccaaagtgtcaagaatgtaacacaggatcaacaagtgttgactaattgataaccgagattccagattaaagacaaattttagtctgatgatcttaaaagtaattatgctrggtggaaaataccctcactttgggtatggttaaaatgactatcttgaatatctcattaagaggataatgtctcattgacatttatactgacagcccctagcatggagccttacgtactggctagtgtgttgaatgaatacctgacttatttaagcttttcactttgaagatgtttggtagcatttccatccagtccttgtacataggtaatcattgtcackgaggaccaaagggtcttcaaaacctgtgatgccaagggggcattttactttctccttttgtgtgggtagccacarctctattcrccgtttttaatatttacttttggctttatcactccatcaagttgtttattttttattcattccttacaatagatgtagcagaatgggataaggcagcatcattttcttccattccattttatcttttatcagcatttagttctcatgtatagcttttcctgagtcatcagtattgggctaatggactggaagggcccaagttgaatggtaattacttactctgttgctgatagcccagatgagaataggacctattagatctgtaataatggaaatctgtgtttaatgcagatcttttaagcagtttgaaacgatctcaaattcatctctctttgccatatgttaaaatgtcacattatggttttaaaattcaggatgagaactgaagtttcaggagagcctgcctgtggaaaagtcctcaaatctgtcctttttaaaatcagaagcatttgttcatctcaaatcaagcctcctcagagatgccagctctgtctgggcagtccgtgcaggcagggtgagacgaagaagaatagggcttagttcacaaggatctaggacagaaggggactgaggggatgtgaggatggtggactttgtgtggtgccaggaggcttcccagaggcttgggccatggattcagtgaatgcattcaagtcaggagctcctttgtttccttcttcatggtagggtccagggctgaatgctcacacttgtgtatcattagctcatctcctgtttcagcagcagaagactttaacttttccccaaatactgctttcttctttccccttttcgtgtgaagaataaaggtacagaaatttgacccaagatacttctgtgcaaaggccatcctctttagattccagaccagacttacgaagtgaactggtttacacaggtcataggtcaatcaatgctggaatgggggctcagagcagaacctagtccccacccagggctcctgccatcactctcagaagtgttacaactggaacttctggtcatcaggattgttgtgtttttgagttattttcaataacctgtatcattcttcttgtctgggaaatggccctaaataatttagcttcctcttagtacagagtcttgtctggagacatattgatgggggctgtaacctcacccagtttcataaatgaagcaggttcatgatggagctcctgtttctcaatagagaccttagaatgagaaatggttctcaagacttgttcagtttattacgtgctgtttgctgtttgattcaatgagtctcttgtatctttgcaaatggtagatgtattgagtagtactagtatggtgttgaaaaagttggtactggtgaaatgttccaaccttgaacctcctgtgacttggaagagtcttcacagaattcaggacagacaggtggtgctgattcattggtgggggattggtttatttcccatagttctaaattatgcactttgacaactcaataaacctgatgtaactgacaacacactgatggatatggtggaggataaagaatatgattatttgaatcaagatgcttatggtatggcatcctagagtcgattgctttttaaaagattcttgagctttgataactttttgttgatacattttctttgagttcagcgagctggcttcatgagtgtgttgttatccacctcttctttgggaggaaaggattgtgttttagtacttaccctgatggctatagaagtcactgtttcatatgctatatcagaattgacttaaaaattgcatgtaggtatttgctacatgttttggtgacatgatgtrtaccattaaggaaatttaagatctttttgatcacaaagttctcagcttacatctggttatttgttggcgttttatttattggcaagctttttctagcagcaggtctatggacagccctgaaatttctttaaaaaccagtcttggaaagaagaaaagctgtggatgcttagttgaaagttcaagttacctgcaaaacatttgtttcaattgaatttgtctatctatagttgatgtagagtgggattttagggaccagggagtgtctccttggtcctaagttaagaaaacaaaaataaagtgacttcactagaattactttgaaccaggtcaagaacctgttcatctcactgtggggtttatatcctccttaccgcttcacctgcctcttttttccaggacaaatattttacatctgatcacttcctaatgagtacatctattcctgagaatggcaaactttgtgattatatcagagcaagaaatcttatttgtaaagaggctgcctaattatccatgacatttaaaatgtctgcattgtccttgagctaagagtgtgaaaatcaggagacccaggggtgtattcacttcctgatagatttcgcttagtttaccatactctgacagtaaaaatcaaatgaatctgagctgcttaacattaacattccaggccggacacggtggctcatgtgtgtaatctcagcacttcgggaggcctaggaggggagatcacttgagcccaggagttcaagaccagcctgggcaagacagcgagaccctgtctctacttgaaaaaaaatttgaaataaaaacaaaaacacaataacattccaagcaggaaagtaattgaaaaaaactgctatcatccatattgctaattttataaygcggaaactaccacagagttataagtgcagcgatgaagatataatagacatatttttgtgtaagaaaaatgaaaattcaccttagtgactgaaagcatagattgactttgcatagacatcagtgtcaataatgatcattttagtaactcaggttttgtttcttcagttgaaattcaaagtaacccaggttcataagtaggctgtgatgttgaaagattggaaactctcaattttgtcaaagattggaactaggttgagatactktggaatgttttactagataaagaggcagggaaataaaataactgttgtttcctgtgatttgagaactacaggatggcaccagaatctcagacctgcagcccagtgaagggattccttcattaaggctcttgttcatttctttcttggtaattttgttggttttctgtttttactagaggaatatgactcttaggaatcatacctgcatgcaaatttctgatgctctgttgattcgtgagcactagaaagagttaaaactccctatttctcacaatctcccccttggcagagttcagttcactgatgactatggtgagtcagtcagtgccccatcctgtgtcatggcatcccacaggacaacattatcttttaataattgaattatttttgcctctatagtaatgtgataagacagaatcatcatctattttttaacatatagcaaaattacccagttttttgaagaagctggaaatacttggatctgcatgctaaataggtaccaaggacagaaggaagacagggttcatcttctctttctaatcgtgggactttgggctgtaagggttggtgtcttcatctttccagtaaaggggtgggactgagcaatctccatggttactttcagctctgagagtcgatcatttataattataatgcatattgcatctgtgtatttcagtcattctgaacagaagggtttttgtcttggcaaggttttgtcttggaatggtgtatatatttttgtggaatggatgctttctccctaatgtctggcaaggtcttgtcttgctttcttctttgttgacattcctggtttctggtccagccctgaatcgacccagctgatggggcatattaattgggagcatgggctgtggagttaaacagacctgggtttatgttccagttccaaacctcagtttatctggctttctcatgtgtaaaatggagaggatgctgactttgtgggttgaggtaagatattcaatgagaggttgaaggtaaagcgcttagctcagggcctgataccttccgatgccttcctggtttcctacacctctccccatgtaaagatttttatttgcagaaatgtcaaccccaaagttgttctaagtgggaaaactgtttcctctacactcacaaaacatttctgacaccaactgtatagattttccacaccaagccattctccagttctctgcagacaccaactgggtgtctaataattcaattcaattctggcattaacgacctggaattagaccccacagcttaagggactcagtccttcaaggctgcccccaacttcagatgccaattgcaagtccccaggttgtcacctgcacttctctctgacttgactacctgactcagtagtccacacaaccccctccttaggtttgataatttgctggaatggctcacagatctcagaataacagtttattatatttactggtttattgtaaaggatacaactcaggaccaacccaatggaagaggtgcataggtcaggtatgtggaaggggtgcagagcttccaggccctttggggtgctaccctccctcacagcaccctgatgtgtttaccaacmtggaagctctaggaacccattgtttagggtttttatggaggcttcattatgtaggagtgattgattaaatcactggcctcttccctcctcagaggttggagagtggggctgaaacttccaatcctctaatgacctagttggttcctccgggagccagtcccaagccacctggagttacctcattagcataactcaggtaaggttgaaaggggtttgctatgactaacaagatgctccccttacccccatcactcagaataccaagggttttaggagcgctgtaccaggaaccagaggcagagagcaaatacatattcctttttgtgtcataattgtatatatttcgtgtatttttgtctggtatcagacactgttggaaattgtggtttagtttacttcagttgttgcaccgaagaaatgtacaggaaatcaggtgtttttggaagacactggattaagagctgtactaaaatgctccatctatttcttcactacttccaaatgttgccacatttttgaaattggaaaattctgttttagttgacttcctggactttacctcttgtgtatgacttcaatcttgataacgttccatgctagtcttcgtctctggacttctctrtcaaatccaccgttaacccatcaaatatttattgaactctaggcactatcytagaaactggagataggtgagaatgagaaaaattcgtctacagctcccagtaaatacttgtccgcagatgggaggaggggacagaacataaccwgtaagcagatatattataatttcagatagtgctacatgtttcaaagtaaacttaaagcagaaggcctggcagggagcagaaggggatgctattatctagagagcaagggtttgagtagaaacctgcatgaagtcagaaagtgaaatatytgcaggagaaatgttccaggcagtaggccagcaagtgcaaacaccctgtgggggtaagaatcttgagatgatcaaaagacagcgtgcagtatagcttgtgcacacgtaccctaaaacttaaagtataataataataaaattaaaaaaaaaaaaaacaatgggagaggaaatgaggccgaagacccatcagggatagattctaggggccctgtaggccaaagtgaagactgaaatgtatcctaaaagtcatggacaaccacaggaaacatggaagctggggatgacatgattgtatttacatttaaggcaattactgaggagaacagatgggtggagaggagcccagagagagggcaagagtagagtcaggaggcaattcactagcagaggaaatagatgaacttgctgggtcatgatggaggtggtgagaagtggtcgtggtccagacgtattatgaaggtcaagctggtgggacttcctggggtcacatagaggtagtctcaccaacagtgttagtgctctggagacctcacttctacccttgggtcatgtacctgcatgggaaaagcctttatcctgaccccaagtgccttggctcaacttcgtgattggtgtgcattttgggtgagtgggggtgagcaggagattaagtaagaawtttttttttctcttcaaaatacagacatatgggtgaaatacaagggtggggcagggagaggatatagttctcttggtacatgaccccatctacagctcctatctggatctcttggcttagctctgacctcctaactttttgaggctggggactagacagggaggtgattgaaaggcttcagggacttgcttggtttatcctctaagctgcagcagctatgtcaggtttcctgattcctgaccccaattccagatattcctttatttgacttacagaatgactaagaatatgcaaagtgagagatgaaggtgcaggctgttaaggccaagagtataaactaaactgtgtgtatcagttacctcttgctgaatgatgcatcacataaacctagcaccttaaaacaacacacatctattctctcacaatttctgtgggtcaggaatccggacacagctcagctgggtcctctacttcagagtctctcacaaggctaccctcaagatgttagataaggtggagagctcatctgaaggctcaactggggaaggatctgcttccaggctcacttgtgtggttgttggcaagattcagtttatttatttatttatttattttttatttattgtgggcacatagtaggtatttatgggttacatgagatgttatgatacaagcatgcggtgtgtgatcatcacatcatggagaatgggggagattcaggtttccaagagccattgggctcagggcctcatttccttgctggccatcgcctggaggccacacccagttttttgtcacatgggcctttccaacatggcagcctgcttcatcaaagcaccagagagagtgtcctagtcacagtgctttgtaacttaatcacataagcggctgtcctcagtgttgccatgttctattagtgagaagcaagttactcaaggagaaggctctaagtgtatccagctgaaatcctgtattttctgttttccccctttacatcagcatgcctttgaagcagataatactgtgtagaccaagtctttaaaatagcacattccatgagccaaccagccacctcacctgcctataacattttcctttatcgtctccactgatgctatagctgaccatgttaggaaccctcatgttatagcttagtttatcttaaatcttgactttgtgtttgctcttagctcttgaggactatttgccttcctagacttggtactcccttgactccctcagtcccagccaggagagtgtcattttaggccattgtcacactaggatgtaggaggtgataaagacagcttagttaggcttaggaccaaggctgtgtgagaaccaaccgaagacagacctgcaatgtgtcatctggtacttacggcctctgtttgccaggggctaagtgtgataatgggtcagaaagtataaggtttacaaagtagctgagatgccacctgggacctactattaaaagccagggcagaatcctacaactaggaggtcmtaacagtgcttggaaggccattgaagctacagtcaggggcagaccaagggtctgggagcttgaagaagtggcggtcaaggcaaaaatggttcaaaatatagaagttcagattgtggagaatagcaacattagtaagcagagagtaggagacaggctgatctctggctaggttatttgtccccacactttcttttttcaatcttttttcccactctaccctggaagcccaggcctagatacagaggcatagtgtttttctctgcgagctaaagaggacggtgtggcatcagggtgacaagctgagctggtggtggtggtggtggtggtggtggtggtggtgctgctgctgctgctgctgctggtggtattggtagtgatggtgttgacagtagtgttgttggttttgttggtataggtggtgttggtggtggtagtggtggtgatggtccttggtggtcttggtggtggtgctgctgctggtggtattggtagtgatggtgttgacagtagtgttgttggttttcttggtataggtggtggtggtgttggtggtgttggtcttggtggtgttcgtgatgttgttggtgttggtagtggttttttgttggtgttattgtgagtggtagtgttgatggtcttggtggtggtgctgttagtgttgatagtgatggtgtgttggtagacttgatagtggtgttattgttgatggtgttggtggaggtggtgttgttgccattggtggtggtcgggatggaagtggttgtgttgatgattttggtgttgatggtagtgagcagttccctcactgctctcttacacagccagcctcttaaataatccccactcttaccctctaagccccaccttagacactaatacaytctaaacctcttccaaagaagcagaaagaatcagtttcctgcctgggaacagtaaaccttgataactactttctctctagatgtaaaaggtttggctggtgttattctcggtgaaaatagcagaaaatccttctctttccagactgggattaaatggcttgatttacattggattctagggttattattatttttaacacttccctgatcggtttttttagaaactagcaagacatttttaaggatgaaggcatattaaaaacaactctaaggatgccttgtctgatgcattcagcttgcctcgtccatctccccatttgttttcactgatctacttaacaacttgtgtagacaggtagagcaggcatgacctaaatttggtggatgaagagatctagattcaraaaagttagtttacatgtcaaaggacacacagtcgtataactgacaactgtatgcaaccaggattcctacctaggtcttcccactccaaatccagcactcacattgtactgaaaaatagcctgattttatcacttgacctgtgaaaggaaagaaatcaagggtgaacaaagggagagaaagtaaatgatgttgaataaaacatgagaataaacagtttgcatatgtagccttttgatctttattgcagggctgagacccggttcttaactgttctttcctcatgccttctgcttttggtaaacattcccaacatttaccatgaaatcctctctctcaaggctgaagggctgctgctccttttgcagagcccctgctgatctctcatctctggagatggctgtgcccttagcgaatgcgaatccccctgtggacaattggygactgagggacagctgtctgcaaggggcatttcatcagtatgcatcacgactggggcttggcagtcattaraattcattataaattactctgagtcccaggaatctcatttagttctccctcagcagctggaagatgctaccagctgtggatctagggtttcccccaaagattttacctaagcattgkgggtaggggcaaataggcaaaacgatctgatgatgagtgggtggggtaagatggacaaccctgtttctgcctttctacctcagagttaatgccctgaagatgccactgggggaatcagctctgbgcacagcttaatccttagtgcttctggtgggccgaggaatgctcaagggtgtctttgtgagtcattgcgagaaggtccatgacagaagagggaaagaaccaaagagagagcaatggagaagaaagtwgcagatggttctctgtgatcttcaagagccaggccctggtggtattttctgtttcagctactgtgacgctttttgtggaatcctggatgaggcctgaactgaccattcactcagtcctctggacctttgagtcctgtgttcctacggaaacccactcatcttgcaaggctcaactctaatgccaggaccaagtgctttcgtgtgaatcaycccttatgattctcacaayagctccataagataggkgtaatttccattcattttttttttcagagaaggaaagcacaactcagaggggttattgacctgtgcaaaggaggagttctgggttggggggagtggaacccatgggagctgcacactcagttcctttgtcccctgaccatggcactttccacacaatactgcatacgtatcggaacagcgtgcctcttactgatccttaccgtgttggaccaggacacagtggcaaggtgagccaggttggccttctgtgctcctggcctttcctcacgtggcccttttcctatcatgtattcacctcttcactgaaagaggtgcttccttgtaacctcactttgccatcctcttctcatccctgttctaggacaggggctggcaaacattttctataaagggccagatggtaaatattttaggctttgcaggccatacggttcctgtcacgatgactgcactctgccattgtagagtgaaggcagccatggacagtatataaatgaatgagtgtggctgtgttcccattaaattttatttaatgacactcaaatttgaatctcttaraatttgcatgtgtcatgaagtacttctaatggttgttcagccattaaaatatatgaaaaccactcttagctcataggctgtacaaaaacaggaggcaggctggatatgggtagctggccatggttttgccaatcccctgttctataactaattgagtagtaatcctttacctttgggtaaaatcatcactgtgttagttctcctgaaagcgcatacaatttaaacctttaactgcaggtgaaaggctttgttgcctcctaaagggatttggggtagtagtggctgtgatgggtggggcggggagaggtcacaccaagcagatagctgcctctgcctaacataacgttagtcctgccgtgctgctattgtttttttcagtggaaatgttagatttaaaacctatatgtcatttgtctttgagctctgtatggagaaaaagatcttgctttggtttttgtaaaaataccagccttagatctttttgtgtgagctgtcatcagtcattccgattgttgatcttgtaaattcatgctttttagtgttggcagagggttgcctttgtttctgtacaatttcatgaagtgtttctttcaattgggacttactttgagcttaactggagctatacttttcatctcaactagattttaaagacatgggtacctggcagcatgctacagaggattgttttagaatctttcctcagtgtgagaacttcgggaaatggtacgaccagccgctgattgagccccctttgacatttggtctccacatgatccacagtgactgagcatggcttgaaacttggccggtgatacctggagtgtcttgaagggtttcctttttactcattcttggatgtgtcctggagtaaaaatttttgtattccactatttgtggaatttggaaagaagcacaggaaaggaaatggagatttaatgaggaacttgatttacaccggtacccaagctaccttccaccaccagcttctgccgcatgttgtatgttaggaagcttactaggactgcagcagctagagtactgtgcaggtgcctgacttacacaaccaccctttcaaaaatcgttccacagcccaaggcaacattgacttaatacatttctcaacaaactgaggcctggaaatctgagaaataaataggtggrctatccactgtaatgacaaggcatgacttcctggtttgtatttcttcccatagtgttttgattacactaagcgttaccggcaggcaatagttatttgctattattgtttttaaattaatcctagaaggtcctttaagtgtatttgataaacatcatgttacctgccagcaaggaattgtactctggatatttctgtcttcagaggtagttctatagtagttctgttgtataacagaaagaactatcaattatttgatcttacagtcattatacatgtagactataaattcatgggatttaatttaatgaacaggttcctgcctcagaactttgaacaktatgctgtgggaaggaaaatcttttcaatttgctttacagactttgagtatttgtaagttcaccttttaaacaattagggaatatttacatgttgaggatttctcacaagattaaaaaaaatacttcttttgaaatagttgaagactgaagagaagctgcaaaaatcgtacatagttccaatgtgcctttacaccagcttcccccaatgttaatatcttacataatcagtgtgttgtcaaagccaggaaatgcacattggtgtaatacttttaaatacagatcttatttggatttcaccagttattgtgtgcactttttttggtgtaagttctatgaaattatatcacatttgtggatttgtgtaacacagatctatagaactgttcatcactccaaagaaacttcctcatgttatcgtttaacagtcacattcctctcataaggttgtgttcagactgtttcgttaggatgtcaaaatagcaacaaaaacagaggtggattttgagaaagtatttagttttcagttgatttccacaattacggatttcgagtgaatgaaagaaaaagaatggggaastgtattcaggttgtgagcactttcacatttatagctacgatccatttaaagttaattgtcgtataaggtttgacgtaagagttggggtttattttgtcccatttagatatacagttgttccagcaccatttgctgaaaagactgtcctttcctgattgaattatctcagcacccttgtcacaattaaatcctgtcttctctattctgttccactcatttgtagaacttatgccattaccacactgtcttgatkactgtaaccttacagtaagtcctgaaatcaggtagtggaagtattccaactgatagttccaaattgtttttgctattttaggtattttaatttttcacttaaactttagagtcaattcatcaatgtctacaaaaacctttctgaggtttccatcagctttgtgctgaactacagattaatttggaagataattgacatcttacagagtctttcagtttatgaacatgatgtatctttccattgatttctatatgctttaatttctctcaacagtgttttatagttttsagggtacagaccttactgacattttattaaaaatctccctagtatttcatgttatatgttgttattakgtaaagtacttcttttaaaaagaaattaacatttcatttgttgctactatgtaaaattatagtttatttttgcatactgacctacatttggtgagcttggtaaactttttagtacaaatagcttttttccttaggattttttacttacacaatcatgttgtctgcgtataaagtattttccttctttcatttttgtacgatttttatttctttttcttgccttttttgaactgactaggacctcactacaatgtcaaatagaagtagagtgagtgtaaaccctagcttcattcctaatttaaggctgagaacgttcrgtctrttaccataaagtatgatgcagctgtagctttttagtagattttttttattagcttatctcccttgttgactaaaaaaagttttttaaacacaggtaggtattgaattgtatcaaatgcttttttgtagcatttattgagttgatcagattttttttcttttttagccagttaatatggtaaatgacattaattgaattttttcattgttaaaacaactttgaattccttggatgaatcccacttggccatgattgttatactttttatatattcctgaattcagtattattaaagaattttaaattctgtgttcataaaggggatctgtctctagttttcttgtgtctttgtctggttttggcatcagagtaatgtgggtcttatgaaatgagctgggaaaggttcccccttcctcttttttcaaggcgtttacataggattgatattatctcttgcttgaatgtatctagagtttctcagtgaaaatctgggagcatggagttttctatttcagattttctatttctcgtgttattttttggtgatttgtatcttttgaagtgtgtctgttattaatttgttgcctcttagctccaaatacatctttctgtgtaagctctgtgataagccaaggaatgtccttggtgtttcttgtttaatgtgagcacgacattaagcattgtcagtagagggcgctttgggggaggggggtcattgctggaggaagtctctcttgccatttcttttgtgggcatgaggaccttccgttgagcctgccccagtcatggccccagaactcagtctctgcgacctcaaaccctcagcctggtggtaatgtttctgcagccctccccacagggcaccagagcccctgggccgcccctgcctgtgccgcttctgtccgtggcagtgcccagcatccccgcagatgattccaaggcctcctgcccccgtcagtgcctggacacccccagcacgtcatgctgctagttcctgacaatctgcaatccagagggtgatgttgcctgtctggtgtctccagatcagctctggcctggccaagcccgcaaacttctcagccgtctggtggctgaagcacaccttctccaagacatctgagtcctttcatgtctgtcttccttgggcactttctgtcagtccgtgtttgccagagagagtttagatcacgtagttactattttattgtagtattctttatattagactttccattaacctactgtgtggtttgtgtctcctgaatggttatccaaaaatttcttgtaagcagtatctgagttgagacttctgtgacctatggtttttgtcattttcaagaagggtaggagacattgctatgtgttcaactggtattttttcctcctttctttactcatcccgtccttacgtgtttttgccagggacttaactaaaatctaaaatgaggaagagggagaccagagtgtagtgagactaagttcaggagtcagtaaactagggccatgactggtcgatcagcttcagcattagttttctggtgtctcatgaccgtgagcagagatgttgaggattttatgagacactataagcatagcgtcccattcttctgctgcttagactagaggtcctataaccttaagctgcttatggatgaagtatctaggctaataaatcacctagcttaatagcagcaacaattttaatgtttagattttattttatttttatagcaaaagggaaaaaacatattttactatagacatcattatgaataggaataaccccaccatctttttacttctgtctagtcagagaaaagagaccccagactcacctaaccaactgatcaacaaaacaaaaccccaccgaaatacagaatattctccccattgcagttaggcctttggcattaacttaaatttagcctccctgggaattttggaaaaacatttttcttcattgtttttgtaagccctatgaggcagaggtataacttccccaaacaaaacagcaggaaaagcaagtagcaatcccctggataatgcaaatgaataaaaattgccagaattattacaaaagtgctaaaagccctactttgatatcttacactctattcctagactttagtggttcagaaatgcctgttttagcaatgccagcacacgagggaacaaagtttgtggagaaaataaaccacatagagatagtctccaacttagaaatgggtcatgttctaggggtcgatttgtaaatcagttagactggaaatatattgttcctgtggaaattggcattataaagatgtttttttttttggcttatgtcattagttttcctttggaaaaaaattgcattatttttcttttattagaacacattactgtattaattttctatcactgtataatcaattattctaaaacttagcagtttaaaacaacactcatttactatcccatagttttcttaggtcacgattgtgggcatggcttagctgggtgcccctggatcagtgttcctcacgaggctgcagtcaaggtgtcagctgcattgtgttttctggggctcattcacagggctgttggcaagcctccgtttcctgccacatgggcctcttcatagggctgccttacgatatagcagctggtttcccccacagcaagccatctaaggagaacaagagagcacccaagatggaagtcatagtctatcatccactcacggaatcaaacccccatcactcctgttgtgttctgtttagtagcagtgaatcactaagttcggcctacactcaaaggaaagggattaagctccacttcttgacagaagagtatcagaatttgtggctatacctttagaaccaggggaggatctgctctcaagttcactgagcctttccaaccagtgagcggtagagtggatcctccccctaccaagccttcagatgagaccgcagcccagctgacaccttgattgcatgtttgtgggacaccctgagccagaaacacccagcttcctattctaataagaaattagaccacttaacttaaagtgtaccttgcaattgaacagtggttgttgtgcaacaagggagttcctcctctccatgggaagaaaactcattcctcagtgatgagtagcacaatgtggagatttctgtctatagttagtagctgaaaggcttaagcaaggatgggaaatgtattcttttcccctatcctagcttgcaaccagcttgaccagtatgtaagggtatgttcttgatgttatagggtagaaattagaatgcttttctcactgaaacagtattctgtaaatggtgctcagggtccttggaaagaattatatatgagactcattatgggctgaggaggcccttctgggcaagtttaccaccgtttataacagcatgttcatggaaaatggtttctaaatctcagacacccatttcataaacatgcttttgaaatgtgactcatttttaaattgggggtttgcccatattatattatgttctccccagaaaccttctcaacaatagtttacattttgagctataagccttttgggaagaaaaagtgacagaaaatagagattactataatttagtcttggcactaatatcctggcagacctatcaagacataattctcctcgaaatcagatttactgcaaggcctatgctgaagtcttcttatagctgaggtatgccaagtcacactcgtcttctacatttctagaattctagggtcttattcaggtgcttccaaaaacatctgatcagaattagcacatgagaaacattttgggcctgccttagaccccattcagcgcatggctttatggaggcctatggccttcccgctgagagagacactgcgcaggctccagagtgggttcagtgtgaggccgcctcctctgtctcccctgtgtttgatattttcagacactgcggtaattttattcagcaaagctccattcagtcattacagaatccatcaaagaagtgtccmttgctagaatgtgcaagtttttattgagcatgtattcagggacgataaccaagcagacggtgctgctatccctaatctccatctgttagtgaagtcaggcacccagcagtgtgtttaaagagccactaccatctccactgacttccctgagttaagatgttctatttcgcctccatctttcatagaaaggcaagtgtaaaaaagcaccaccaagcgcctgtctgtgtcgtgtgtagaaccaaagtggaagattttgttcattatgtttcttaatatgaatatgcgctgggttatccaacttcccttaattagccatgggaccaagtctgctatctcagaatgacaggtccttagaagaaaatgttagagtagctgatttacatgtgctgtatctctagtaagggcaggattttttaaaaaaaatctacccacttattgaaaatcaattgagagcttcatagtaaaaacttgataatttaagggaaatatataacattccaacagcttttagaattcagaatgtgaacatataaaatagattttaagatactcttctgttatggaagaaaaattgcaagagagagagtaacagaaaggatgagagggaagagggatggagcaataattcaaacagcaccaagttccagaaaggcaaaatacttgctgctgtacgagtctcactctccccctctctcctccaaagtaaaaaaggggtgaacccacaaatacttcatttttgaataatcttttatttctatccaaaattttgcatgsttgatcctcttaaaatccttcccccccttaaaaagaagataattaaggctagcctccatggctcctgcctgtaatcccagcactttgggaagccgagacaggtggatcacttgaggtcaggagtttgaggccagcctgktcaacatggtgaaacctgtctctactaaaagtacaaaaactagccaggtgtggtggcagccacctgtaatcccagctacttgggaggctgaggcaggaaaatggcttgaacctgggaggcagaggttgcggtgagccaagatcatgctaatgcacttctgcctcctcatttccacagagtgaggaaaaaaaccaaaaaacaattaacatattactctggggactgcagcccaattttgtagaggaaatgaagtgatagctctatcttgaggccttctagggtacttacttggaattttaaagctgggttgcagtttttctaccatatgatacaaatgggatcatctttgacatttgtcctgggactggatgcagtttaagcatgaggctgatcagagctcaggggctgcttacctgcagctgccagccactcctacatcccagcctggccctcagccctgggaagagactcctgggcttccaggtgttcactgggggagcaaagactggagatgtttaaaatattttttatttccgtttctgaaaaagtaatacatcacacagaagttcaaaagtaacaagagtttttaaaaacaaattatagaatgcagtactattctcctgcactttgatttttccctcaattaactgtgtatctggtagatagtttcatatctgtaactatagttaccctattctttataacaatgctgattattgcatagcatggattattttatgcaaactgttaggaccagtatttttacaagcaatcttgtgatgactgtctttgtccgtgagcaaagcctgtgctatggaagctcaactgggatgaaccttgttaatgttccatgttaatttcctatcttttttgtttgtttgttttttgagtctcactctgtcgcccaggcttcagtgcagtggcacaatctcggctcattgcaatctctgcctcccgggttcagacaattcttctgcctcagccttctgagtagctgggactacaggcacatgccaccacgccaggctaattttttgtattttagcagagatgggggttccccatgttgcccagggtggtcttgaattcctcagctcaggcaatttgcctaccttggcctccccaagtgctaggattacaggtgtgagccaccgtgcctggcctaattttctatctctttatcactatattatttcctgtagaatcttctttgtcttctgaacctcagcaagagacaataattgaataaattggaagccttgtgtttttaatggaggccagctggcctgagcaaaactgatatctatgtttatatctacaatgattcctcttttcttcttaaagtcacatatttagctatctccttcatctctcatgtaaaaagagaatcaagacaagtttgctgtaaagtttataatgacacagttcatgctccatttttgatggggagcttccatcaagaaataaagccagaattcgttttcacgaacgaatagcagccagaaagccaatagccctgaccttaccctgcagcaggcctgctttgtaaagctgacagcagtgttcaagggtgaaaggttggtgttggtctggaacagattggaaggggaggtgtgggcccatcaggctcagctgaccattacctccgatcatttatcactgtcagagaggagagggtgcggggtgggggagccactggaccactccccgctcagctgctctctgacagctgacagtgccccttgcaacctccaggcatacgatgtgccttcaagggacagtgtggtacatgcttaaggccgctgacatgttcacaaggaagagagatgtgctgtatactgtggagcttctctagaaacgtgtgccaccttctcttcgtgctgtggtgtagaactgcttgtagaaacatttaatgatgttttggaggcacacgttgggctccagagtgacagtatgacttgggtgataggatgagcaagttcctcggtgggcctyatgccttaattacatccacaatacctggggactctgtacaacactgagattttaatgtggcaaaaccagcatggacagatgctggggaggaaggaaataactttgctgcttctgtgggtcaggaagcgaggcccctacacgtctttgaaggacagtaccttttctaaaaaatgtatttatttatttttattttttgagacagattatcgctctgtcacccaggctggagtgcagtggtgcaatctcgactcatcgcaacctctgcctcctggctttaagccattttcctgcctcaccctcccgagtagctggaattacagggatgcaccaccatgcccggctaatttttttttatttttaatttttttttttaatttttagtagaaatggggtttcaccatgttggccaggctggtctcgatctcctgacctcaagtaatccgtccacctcggcctcccaaagtgctgggattacaggcatgagccactgtacctggccaggacagtacctttataaacaagaataataagtatgatttgtatatgactctttatagatatgtttaacattcatcttcaaaatgtaaaatatgttttagactcaataggaaacacatgtcttagtataaaacaaattccttttggtctatagccatgtgtttcagtacacctactttcaacgttgttattcacaagggtgtcacaggcatcaggctgaaatacagattttaatccttaaaataaccttattttcattgtcatttatattctcaagattatctaattttggtagtcattaggaattacttgtgttaatagtggtggtgagatttcataaaagtcaggtggaaaatttccatcaattaatgtaatattatatgcttatcacagaygcctaagttagacatggtacttaaatgtggcaattaataaaagtattacaaaggtgaaaatggatttcttctaaaaatggaattaatgatgatggagtgcttgtgttgggaactcaggctagtctggtgcttgccggagatgcaggatgcttkgagagctgcaggcagtgctgtcaacacagaggcatgtgttsacgtgtctgatcagcaaccctaagaagtgggtcgggcattgcgggctggtgaaggctggagagagggccagggttgtctttccgtctgtatcaccaccagtaagcactgtgcaaataccagtgttcaggagccacattctaactgtgatggggtttggctgaaatgcagatccccaggccttggtggggcagatatgggttcccaggtctctctgccaacgtccatccgccctgcctacacatgcccacctgggagttgataagcttgctcagaagccctctccaagacagggacagtgacttggccctgaccagagaggatgtcaaagaccagtaatacagctggtttggtttattctggaagtccccgaacagcttgagtgtgcgtcacttggggcagtttcttagctagcaagccaggatagttcaaggtgcccacaaccctgggaagaaaagggctctgctgcaccttcctgtgatggagcaggcaagcagccggtcatgggttgttgtcatggaagagagggtgactgctttctctttcctgctcaaagaaaacagaggagtgggacttagaagagaacaygtagtattttacaacttccaaaatatacccgataggggctaactttccttttttcaagcgttgctttcagtttttttttcttttgataatttattgattagcaaagaaatatttgcttaagaaaaatttgggaataaataaaagtataaagaaggaagcaaaatcacccataaatcagcatataaatcagccacgactacagcatcaccatgcttccttcttgttattttccttgactttgttctttacttgaggaggatactttattatttttttttttgttgttcttactttttccccactcaactccatatatattattattatttcctgatgccaggaaaaaagtactcatggtcatactttaaaagttaccatataatactgtatcttagaactgtgtcacaaatttattctccatgtgtggggtcattcagcttatttacagtttttctgtattttaaacagttctgttgtaaacatctctggaattctttgtctcaattctgattatctcctacagtagctatttataattgcagtgactaggtcgaagggtggaaatgcttttgacattcttggttggttgtggtagttgtggcagggtctcctctgtcacccaggctggagtgcaatgggacagtcatagctcaatgcagcttctaactactgggctcaaatgtttctcctggctcagcctccctagtagctgggaccacargtgcacaccaccatgcctggctaacttatttatttattttttgtagcaatgggagtctcgctatgttgcccaggttggcttttggcattcttggtacctattgtcagactgctttccaattagattgtagcgtttcatgtgccatgagcagtgtaggagaaagcttgtctcactgaagcctggtcagtgctcggcattgttttcgcaagtttgccatttgcacgaatcaaagctagtctctcttttgagactgagcatctattgtgtatttatataattaacaatttatctgcataatatcagttcccatcattcctccctttgtctttggtgatgcaacctctgtcttttgcagaatcatggatgcctgctttgggagcctggagaaatggtttccatgctgtcttctagggccgctgggttcctcttgcactctaatgggggatccctctgatcacctttcttcactccccagacagtctgcagtctcagggaatagggggcatggtaggctcaccctaggccggtaggctcactctaggctgggttttttgtttgtttgtttgttttttgagacgcattctcactctgttgccaggctggactgcagtggtgcgatcttggcccactgcaacctgcacctcccgggttcaagtgattctcctgcctcagcctcctgagtagctgggactacaaatgcgcgccaccgtgccctgctaatttttgtatttttagtagagatggcgtttcaccatgttggccaggatggcgtcgctctcttgacctcgtgatctgcccgccagtttttttttaatgaataaaaagggcttgtggttggggcatctccattcagctttgccatcctaggcttgtagtcacactagtgggcttgtgcactgagcagacttcaggaaatgcagcaggcaaatcatgagaaggaagaatgccctctatttgcataatgctttattctattaaaaatgtgtcctcatccttatttcctcactctttgggctaaaaatcctctcttaggatttttcttaataactggttgatgaaatggagtccttgagtgtaggatctgtgaaatttatctttgccccacaacactaactcctggcacttatcaatgtggagaacatccttgccagggagtgaacatgagccaaaggacccgcctctaggtaccagcttatgcctcaccaaggtgggttactgtgctggctgggctttcagcctggcctgttctgcccatcctattgtgacctcttgaagctcaggcttgttcttctgcagaaagagctgggaggtatgggggttgcctggggaggtatgggggttgcctgagctgggcatcggctccattaccagccgggaggtgtatctccgttctgctgcgtctggagcaaagggagcgggccagatggtmgtggagggcggggttgactgcggggaggccgtggtcagagcaagaggataaaatcctgaatgacacctgatttgtttttcgtgctgtgatttttcactgttgtccaattgtcctctgtttttccatcacataccttttgttttgggggcagcccccacttgcatatggtccctggtcaccatgggggagagcagtgagctgccttccccttcacctccagctttgagagtaaatctcaccttctgggtacccacagcagctggggacatttgccttattcccaccatggccttcctgggggactccctgccttgctgctcctcatcacgggtcccagctgctggttgtcgcttgccttccaggtcagggaggagcactgggaattcctgggacacaggatgagtgggcgtagtggtcagcagggaggggagaagcccctcccagtgactcacccagcaccatgtttgtccccacgtagcctctcctgacatatagaacatgctgctattgggggcaaaacccactcttggttaacttgcaccttaaaacaccatatcgcacattgtaggagctgtgagggacaaacacaaccagaacctcagtgcccctgggcatgtatgactagaggcgtgactccatcctctctcagagcccctgccccagatttgagtgacagccacctcatccttagcatctgcggagaggacctgggcaggatcagggcccagaacgctcagtcagtgtccttgaggggcccgctgcagagatgggagtggctagtctgaggccagggcttgtgggccacataggaaccttacttacttcctgactgacttgtaccctgaaccaccatgactttgtgacctggagaaggagccacaaagaaacagataagaagagggactgtgagaccatattttgttggggtgttgacagatttttaccatattactgagataaatgcactttactccagccccacygtgaccctcctctctgctgctcagtgtagtagcagctggattagtcagtagaaacacttgatacgtcagtccagatccctcaggagcatgcggtatgggttgggttggcatggggttaataacatgacccgatgagattgtacttcttgatgaccggcagttctgagagtttagtctgatccaagactcttccagtcctgagatgattttgtgtctagtggctaaccaggactcccaagatggcagctgctgttcctggaatctccagttaggtggtgtcccctggtcacccagtccccactgctttccccaccctccttacccagaggatacgaattttaggtgttcccagttgagcacaggacagggagctcatccctgattggtttatgcctgattttgcattattgtagatgtgttaccaagcagttttactgtgcccttttcaaggaagaaagtcatacaatttgaagtgcatgagacattcacaaaacaaaataaaaagcaatgtcagtatcatcttcttaagcttttgaacatgtccccccgatccccttcaacatccagaagttgactttgacccagtcttggtctaattaactgctactctgcaagcactgcgctctcaagatgaatgaaaatctgtttcttgtcctcatatcttcttggtggaggacacgtcactgccatcagcagaggttgtcctcccagagcatgtggctttggcatgtgccccttgtagcagagaaggggctggggcatgtgcccaacccaccagttgggaggcacccactstgctatggctgggtaacagatgtccctgttggagactcttgtgtctccatttgacactctactggtaatcaatagttagggctcaattaatgaatggcttttctgtttaataaatttgtttctgtggtgaaacatgccattgattttgaaacaaatttgtaaatggtgggttaggttcccaggttagcccacccttcccccatatcttactgaacctatacgaagggtttaaaggatctttggttctttggcccccaaatacttgccttagcagaatttcaatgagaaaatgtctttaaaaactccaccttggtttctaggaatagagctggggtcatttcttggttgtaaagaacttgctattttcccattgtggagtggaaagtagctctcagatttccccttattcttttatccctagagcaatatatagtgtgggggattttcagaggtttgttatcacagtgtagaaatgagaaggaaaatgacttcttcccctgtgccatctttgttttatccatttaaaccagcaatggcaaaatgatttcatcacacatgatgcctctaagcgatgagactctatgggtactgtgttgagaaaagattctgtgggcacattcagggatcaagaaagtatgctgtgtttgattagtgatgtctgccatgggcatggtcgtggaggggaggtgactaatgtttatttgccgttcctgaaacagacctgttggaaagtaaagttcacacaggtgataataccagcctaactgttwtatagagtttgttatgtactggacactgttctgagtgctttttgtatttaattctcaaaacaccccatgaagtaagtacaaatgaggaaacttaaaatgaagaaattcttacagatgaggacacagaggcatgaagaggttgagtgactaagccaagatcatatgggtaggaagtgggagagctgagagtcacagtcaggccgtcttgtcctggatcgcctgttcttagccaccagttctgtcctgtctcctgcttgtgagtgttgtgcctgcggtccacaggactgatgtaagactcagctgtatttcagtagaaggtgcaaaatcacgttttaagaacctgttatctttgggcttcaggctctggaattaaagacaagacaaagccgccagggacctcatgagtgatgagggaatagcaagtgaactccctccaccttctccaattcatgcagtatttctggtctttccatctcagccagcactgcccacctctcagttgagactaggtaaatgggaaagggaagaggggttgagatttaaggagtggaatagaggagttcccttgtatccaggtcacctggctggggaaactatttctgaggggccattttcaatgatcattttatgtaaggaacacacgcatgtacacataaagatatgtaacagtcatgtgccacataacaatgttttgaccaacaagggattatgtatatgatggtggtcccttaagattatagtggaactgaaagatttttatcacctagtgacattgtaaccatggtgacatcgtagcacaacacattattcatgtatttttggtcacactgttgtaaacaaacctactgcactgctagtcatataaaagttcagcacattcgataatgtatagtacataatagttgataatcatcataaacaatgatgttactggcttatgtatttgctatactatactttttgtccttattttagagtgtgctcctgcagttataaaaaactgtaaaatagcctgaggcaggtacttcaggaggtgtccagaaggagacattgttaccataggagatgacagctccaagcgtgttattgcctctaaagaccttccagtgggacgagatgtggagggtggaagacagtgatattaatgattctgatcatgcttaggcttaggcgaatgtgtgcatttgtgtcttagttttcaacagaaaatttaaaaagtaaaaaatgaaaattttaaaaatagaagttttcaacaaaatttaaaaagtaaaaaatgaaaattttaaaaataggaagaagttttcaacagaaaatttaaaaagtaaaaaatgaaaattttaaaaacaggaagagcttatagaataaatataaaaatattttcatataattgtacaatgtgcttgtgttaagttatgttattacaacagtcgaaaagtaaaaaatagtttaaaagtttataaagtaaaaaattacagtagctgaggttaatttagtattgaagaaagaaaatttaaaaaacaatttagtgtagcctaagtgcgtgatatttataaagtccgtggtagtgttcagtaatggcctaggccttcacacccactcaccactcattgacttacccagagcagcttccagtcctgcaagctccatttgtcataaataccctagacaggtgtaccttttttttaaatcttttatactgtatttttaccgtaccttttctgtgcttatagatatctagatcacaaatacttatcattgtattacagttgactacagtattcagtatagtcacatgctgtacaggtcatagcctaggggcaatagactataccacatagccatagcttaggtgtgtagttggctctaccatctaggtttgtgtaagtgcactctgtgttgcccaatgacaaaatgacctgacaacacatagatttccctgaatatatccctgttgttaagtgatgcataactgtatatatgtatttttaatggatcaaataagttatctttcataatggctaaagagagattttttagtaccatttacctcactcgttaatttaacaaatactcatcaaatgcccgttctgtgtccatacgctgagagaggattatggaaatggggagtcagagagctacgacccctgccctccctgagcttgcagtctactgatagatgcagtccctgtacaaacagtggcataagtgcaaagtgctacttgggtgagtgctgcagaggaaaggcccttggtcctgagggatcagggtggctgtggtggatggatgaggratgctagtgttctgaccatgcaggtgcttgcaggccatgccaaagagctttgactgtggcctgagagtcatgggatgccatggaaggggaggaggggtcttggagtttgtgtcacatgattagatttttttccctttggaaagataattgtggctaccttgggaagaatgaattggacaagggatatacaagagttagaaggcagatgtcggagtccggaaaaaggggtcatgacatttggggctagggaggcttcggtaatgaaaaaaagaagtgagggggatgctacaggtgtctggagggggacagtcgctggctgtggtggcagattggatgtggggagtgaaggaagagaagggataaggacagttagaaagcaggagcatggcaggcccattcccaaaggtgggggatgctggcacagaagctggtttgggatgggaggacatcctgtgtagttttgcggtgttcagaggagatgtcagatagggtgcactttggattgtgaacatgtgggtttcagctgggccatcgacagaccttgatggattgtcctgggaaaccaactactgtggaaaaartagaaaaatctataattttcatttgtttgaattcaaacattttcaccctagacaaaaagaaaagaatctaacaatgagaaaggaaataaataaaaataaatgtcttgcatagtctttgtgttttcatttttatgttcttctgccagtcttttcacataaatattcatattttaattagttgtcattatagtctatgtagaagttgtaataggattgtgtttccttaccattatcccaaatattttcccacatttctgtatctctctcaaggctgcatttaaaacatgttgggtaatattccattcatttgataaatcataaatggtaattttctaagcaattcctctacttttggatatttagttgattttaagattttgttawtacaggtaatactttcatagatattatgtgtatcaccttttcttctcgtgtgtttttttcttaaggtgtattcttacgagtgggattcatgggtttaaagagtttggtttctgacttgtgatatgggtcaaggcaaatgttttccaaaccactgacagggctgtgaggcaagaacgaaagggcagatctttgatctccacacggaagctcagcatgtttatttgaattcagtaaccagtggtcctaaccagatcagtgaatgcttgacagggtccttccatcacacagctgggaccttccatcacacatctgctaattgtgccagttagtggctacagacctctataaggccactgagcccaccaccttgmcctcagaaccctgggctgggttctcccttttcccaggctttttgcttgtaggaatgccacaatgactttacaaccagtggaagccccagaagggaactgatggaatccctaagggctacaggcagcttcccatgggtttggatgggtgctcaagatcttccgtgacctagtctcggtctaagagatttacttgccattgcttctcaaaatagcacctccactgcaccaagacagattgttctctggcccgggaagatgactcctggccctcactgaagttgctctctcacccttgcctttgcaaacctgacttctccttcggactccaggagtggcagcgccttctggcagcacatctgacttcccacccagctctcctgctacaattacctgcactcctgcagaaccctccgtccacatggcaggacttagcacataattatatgccttctttaatgtttgtttttgcagttgttatttcttgaagataactgtactctcctcgagggcaggaactgtgtcatccttccctagacccctccaagcgtggcttcagtgctgagccctttgcctgaacccagccaatccagtgtgacccattacatcaaagcgtctstgccgatgatgcagtgtgaagcgtcttagctatccttttcttttgtgttttccacataagtgctcctattcaaaacctgctgaggatattatttagaaaatgctcatagatggggaatactcatattgtctattgatcacagtttgggggttgtaagatcaagttaatgctggaaaacaataacctggtcacttgttacttccgagtcctcagtgtttactagggtgggaagggtgactggttaggaggacctgggtggggggataaggagctgtaggaggcactggaatatctctctggctcttaaggaggctggtgtctttggcctgggtgaacagtgcttgtactgtactgaaatgacatgttctgctattgtgttttttgaaaaattgctcccaatggaaccttgccctttttacttctcactttaaatactgagtgcatcagtgttctgattgttaggagtctgcagggggactcacccccagttcagcctggaagttggagctttgcttgttttttagagatggtgtggcagaagagggactctggctgggtgtcgggagccttcaggcccggctgggtctgtagccacccattgtccagctctgcacaagctcagacctcagcctactcatttataaaatgacatacctgaactagatgatctctaggcccttctgcaatggagatgaaaaacaaaataattgaagctctcttcagagggtaagcttgggtgcatttttaactcaaaggagaaataggctcattgacacatttaatgacatgtgttagtatgtgttagaactttacacttaaacttgcatttctttttttttttttctagccaaacatcatgtcaatggcaacagaacagtcgaacctttcccagagggaacacagatggctgtatttggtaagatatcaattctgaaagaaaacccaaattgtgtgcaaagactagtgccaaatttcttagttttagcaagtgttctcagggcttcaaaatctgggctcttctagatatttacaagttgttacagccaagaaaactattgagttcctagtaatttctggggttggaaaagcttattctatagaatttagcgtgctttattttctcacgttgacaaccacgtatcaaactgagtatttgctatttcttatgtccacactgtgaattaacctgctaatttagggtttgagtttttctttgctagcacggattttttttttttccgcatagatatatcactttgttaaaggctggaatttaagtagttttgacttattattacacaaagattaatctaattgaatgatctcttccttctccatcatgaattaagcacgctccttaagagaaaacattaattaaaaatgttttcagcaaaggccaatccctgagtgatatacttaaaatgtacaattatgtggttgagcagaacttctctgttaaaattccaaactgtttggtgaagaggtcctttttaatctgtgtttccttccctccatgcctcatgtcatctaaacttccttcagaatatctctgcacatggccctttctttgcctgccttcttttctccattctttccttccttacctcttcttctgttgggcccatctcccacctcccctccccttctctctagcagtgctctggggttcatccctgtgttacccactgaaaatgacgacctctgtgctctggaatttcaactgggcattcagctgcctcccttggttccttcacctccacgtttagacaggttctgtgatgtctctcatcctaaaaatgtgaggtcccctgatttcacgcctcccgtagcttctctcctgctctggtcttgatggtaatctcctttgagggtacaaaactgctttgaagacttgaattgcgtttgaactggaaattagcctcagaacaacctggtctataaatgagcacactgaagttagattgttcccttattcccagagatggaaccagaattaggcatcagtgaggattagcagctgcagagtcataaacagggacccagttccacctcagtgttggtaaatcatgctctgtgtaggctatcaccttttaaaacatactgatcagtgatgagaaatcattatgcccagaaatttaaatggagaagttgattttgtagaaggcataatggcctctctaaaccatgtgctaaaacgtttgatttgctaactttcctgtcccagcatggtgtctgttatcatgggacagcaaatgtcacatatatcaatgttcaaaggggtcttttgatgatttatttatttattttccagtctctcagattcgccaaccccaggcatatgagaaactaagtcttatgtcatattgggaaatagtaaatgacactaacctattattagtgggtttccctctgttgtgatattgaagtaaaacttctttcttgaagggcagattcagtaccagatgggctgatgacattgtttgactacagaattcgaaataacagggaatgaggctctgtggcaagtctttcttttcttttctttctattttttattttattttattttattttgcagtggggggttgcagtggaaagatttggtttatagcggcttcctcaacattcttccccaaggccctcattgtttcactttcagcgrgcaacttcccctctctaagcctccgcttttcgatgaggaggctgacaggtgaactctaaggcctctgcagctctaggcccttggcctttacctcttacgccttcaggactgaaagctcttggagcagggggcagcccctgggaggcccactgtgcatggccagcatgtgtggttttagaagagatgaatcatgtgcataatttctacaagttaacaacatataagaagcagaattctacagatgataaagtagaatatgtttgacatctaagaattcttactttagaagtgcagtttagctcttccagatgcttaaattaaggccttattttggttaagtatatgcaagcattttatattaatgtcttcaagatgatcctcactttctatcacttgtcgccctgggctagggtagagtaggggatttggggggttttgagggtggacttctgccattctgggttgtttatcactgcaatggaaaggtcaactcagcacagtgcttgactctttgggatacattgggcatttcatcctgccagcctcttgcaaagctgatggactcatatactcctcttcctagcgaggccatgtgacttatccagagccacttggccaaggaggtggttggtggagctacagtttgagcccaagtctaattgacctggaatctatgttcttgttgtgatgttccctgactctctctgcactggttcaaggaaccatgggaaggccttatagattcagggacacctttcagctgggtccacacacaaaagtatgatctgcagccaggcccatttagcaaatcgatttgtatacttgcatgccttcccggagtgctctgaaggagtcttgagaagtagcctttgctgggagaatactggttggagcaagatctcctacggctatcatgcttttccatttgaccacagtagcatgtattattaatgcacaggaggatgtcttacattcccttgactgtgagttcatcaaaacagtgatggcacttgtaattgtttagacccgttcttcagccttggaggtcttcatattttgtgataaaatagtatcactaattataatgtcattttttttttttttgagatggtgtcttactctgttgcccatgctggagtgcactggcacgatctgagctcactgcaacctccacttcccgagttcaagcgattctcctgcctcagcctcccaagtagctgggattacaggtgtgcatcaccacgctcaccttttttttttttatttttagtagagatggggtttttccatgttggccaggctggtctcgaactcctaacctcaagagatccgcccactttagcctccccaaatgccgggattacaggcatgagtcatcgcacccggccacaatgtcgttatctgttggttaatcatttgaatataccttacctttagaatgctaccgaaataagaactttgaaatgtaatccactctacagatgaccattgaacttccatgaagcttttagattagaatgtgaaatgtcaggaaagacagatagagtgtgggataaaggcattccagtgtgaaaaatgcatgaatggtcatatcaagggatcagagaatagatagatgattccttaaaaactgtcgctggcatacagtcttcacagattttcttatgtagcccaacagttagtttttctcctggtctccttttctctctggtttttctgcccccatcattcytagcttcctctgtggctctccctctcctctgcccttttggacaatgagaacgaaggtaataggcttggtcctcctkgggggcttctcctacctgtgtgtgatgctgtctttcaagtcagtgggagccctctgcttgcaagctggaaaagtggagccacacattttgcaattacttcctgtctttgttcctggtagctgtgagtgcccccttggctctcacccatttgatctttagagcgcccgccctgtgtagtgggcatcattgtgctcctttataggcagacaaactgaggcacccagagattaaagaaacatggccgaggcttcctcaggtatgagaacatcttttgccaccctgctgggcctgtcttagaaaggttctctctggccgtcaatatcttaatgaaagtgacattccgttggccacggtccactctgtccacgtggagggccgggttccagcctctgcagaagtgcttgttctcagcacagaccagctactcattgccttaaaaatactccatagtcaagaagatgggtaatttcacgagaaaatcaaagcttactaatttaaaagggtggaaaatggagggcakgggattccaagcttaatttgtgaagattcttggtacaattaaaaaatattttatataaaatattagctgggtatggtggcatgcacctctaatcctagctacttgggaggctgaggcaggagaattacttgaacccaggaggcggaggttgcagtgagccgagatcgcgccactgcactccagcctaggtaacagagcgagactctgtctaaaaaaaaaaaaaatttaaactttactatctttgaacataaatttgtcatccaaactaggatacattcgagagtaaaaagagtgctgtgaacaattatactgaaataatgaaataatgagggataaacctggagggttttaggcaattaggatataatgtccccctttaacgaggttgtatattataacgtattgcaccaagaataataaatacacaccaagttaagtagaaatggaaaaataatgaacttggatagacaaagtgaacaaatggaaaaaattgcaatgacatagattggattgtatataatgtcacatccacactagtagttacgctaactttggaaattatattcaataaatattgttgtgttcttcctgaataacttcagyttgaaagttaatgcgtattcataaaacstagtttgtgatacttcaataagagtgagggarttgatctgattttacagttgcagttttaatattgtactaatactttccagggatgtagggtaatgaattctccattacttgagatattcagatggtagagtggtcatccttaaccagtttggaggtggggctatgtagcctttaaaaccctttgttctcarttactgagaattgactttgttttggaacactgaaacatttaaaaaaacattctgctaagtcaaaattctttgaacccatcattatttattttttaatttaaaagttttgtgggtacatagtaggtatatatatttatggggcatgtgagatgttttgatataggcatgcagtatgtaataatcacatcatggaaatggggtgtctgtcccctcaaacatttatcctttatgttacaaacaatccaattatactcttagttatttttaaatatacaattaaattactactaactatagtcaccctgttgtactatcaaatgctaggtctcattcattctttctcactattatattttgcatccattaacgatccccaccttctcctgtacccctactacctacccttcccagcctttggtaaccatcattctactctcatctccatgagtttaattgttttgatttttagatcccacaaataagtgagaacatgtgatgtttgtctttttgtgctggacttatttcacttaacatagtgttgttgcaacactatgttgcactatgcactatgacagggtctcattctgttttatggctgaggagtactccattgtgtacatgtaccacactttcttttttttttttttttttttttttgagacagagtcttgccctcacccaggctggagtgcagtgacgcgacctcggctcactgcaacctccgcctcctgagttcaagcaattctcctgcctcagcttcccgagtagctgggatgacaggtgcgtgccaacatgcctggctaattttctgtctttttagtagagacggggtttcaccatgttagccaggatggtctcgatctcctgacctcgtgatctgcctgcctcggcctccccaggtaccacattttctttgccattcttctgtggatggacacttaggttgcttccaaatcttggttgttgtgaataactgctgcagcaaacctgggagtgcagaggtctcttcgatacactgatttcctctcttttgggtacatactcagcagtgggattgctggatctgaaggtgtgaacccgtaccatttgggaactcacgtccaggctttttggtgaaaggtaagattctgcagtgagaaaccttaatgttgataaattgataccaagcagcaacagcagaagtacctctgcaaattctttgggttgtcgtgagttttyaggctcctagtagcctgatggcaatgtctctctgacctcaaaccactggaaaacatgttttccgggtcagattctctgaagattcttcaaacragagtggggagcaaaagccaagccgaggacttaggaaaatgtgttttttgtcgcacggcacatctcttttgacagctaaggtgccgagtgttcgcgtgacctttttttgaacagctgtgtgaatggacaggtcccggagcaggggcccgtggctgacaggagcccagagacttgtccctctctggggtactcaccttcggcccctccaaggagagtgagatcaatgtaagatgaaccaatcacaagaaatcgtttcctgtctgacatgaatgggaggtgagttttgaatcagccccggttatttgtctgccagccaagaaaacaacattggaagcagccggcaatatgtcagacttcaaagggaagtgtcttggtgtctcactggcacatatccagcatgatgttggtaaataaccgagtcccggtgtggcgtatttctccctgaatcttnactgaaaactactgaagcccattctgtgaactctggaggggcagccactcattccaggaaaaaggccagaaagaatgacattgaaatgtgtttataattagcgaaacaatctaaattcacaagatggtcagaactgcaggctgctaactggtgcaaacttcttaaatggtagarcacttggagagataaaaataggccttcctccctgggtaatttgaagcaacttgagggggcaatggtcattggagacatagtttaagatgcattttattttatatrtcttgtgcatgatttcaactttcgttttcttcttgagtgtagagaagtcagataatatagagaaggagaaagagacctttgaaaacctgtgttgaaaatctcttttggtttggaaagcattggctgggatggtgcagccacgttgacctgggctggtccagaaaagaacaaattatggagtcacagaggagggtgggttcatatgtttagagtatggaaggtggactgtaggttggaggatggcacagaatccattgtagaggggagtaagttagagaatgtttcatataataacactttacttgtatagagatcacttatccatgaacttctcccatttcggttgtaagtaagaaccagaaagtgaagccctcctcccacaaaaaggttatggaggagtctgtaaagaattcagaattcccaaaggtcactggagtcctgtaatccttgttgactctagacaagtttcttccgccttcttaagccccatctctcatctgtaacatgacaagaaaactgtttgccacctaggactgttgtcagagtgtcaggaaatgatgcattggccccttggcatggggatgacagaccagccggacaggtgctccctggcagaccacctgctctcctcactctgggtgagctgtgatcaagtccccgggagagtgacgccaacatcactaggctctatgggatccatcacctctccttcataacaccagacgagtcccgtaactcagggattttgaaggataacagacagcattagttgagaactcacctaatattggctgggtactgagaagcccatgttattaaactctctatcaggctcactctcaccatgtgtccaagtgagactggttgtttgcttctgtgtcaatacagagctctcagaaaatactatatttctcttttggcctcaactgtaaagctaatcagatgtggctaattttttcactttttgcagtagtgtacagcaaccacccacttgactgacgttttttcctttaagttttgacaacgagaaagatttattttacaaatgtggcggacatttcttaaatttctacagagaaaatacattcaacaggatgttcaggagaaacaatcaaatattttctattacttctctgttaattaacttttttaagaagagaaacataggtatagagaacaactaaaaggaaaaaagttactcattattaaatttaacccaactagcatttttaagaaaaatacggagcaatcaaggatcaaattcagataatataaaacctaatattctttttcttgttctcattctccccagccatttatcttgggacttgttataaaatggattaaaggaaaattaaaatatatgcaagacacagccaactaacatgcattagaattaggtaaatattaggccaaaggaaaagaaagtgaaatgaaatacacaaagaatgcatgtcataatcttacataatttataaaacttgctcataaatttggctctatgtttcctagcagcaacatgaagaaaaatcagttggttgcatgatgsacttcatttttaaaaaattgtggtaacagatacataatatgaaatttatcattgtaaccattktttaagcgtatggtccagtggtgttaagtaccttcacattgttttgtacccatcaccaccatctagctccagaattattttatcttctcaaagggaagctccatagacactaaacaccgtctagtcctccttcccccagcccctggtaacctctattctacttcctgtctgtctaaatttgactactctagggacctcctatagatagaatcatgcagtatttacccttttgtgactggcttattctacttcgcataatgtcttcaaagttcatccatgttgtaytgtgtatgaaaatttccttcttatcccattgtatctatagaccacatttggtttgtccattcacctgtcaatcaatacttgagttgcttccaccttttcgctgttgtggataaggctgcgatgaacctgagtgtacagatctctcttcaagtccctgctttccattcttttgggtgtatacccagagatggaattgctggagcatatggtaattccatgtttaattttttgaggagctgccatatcattttccaaaacggctatacttttacattcccaccagcgaaccacaagggttccaatttctctgtatccttgccaacccttgttatttatttatttttaaaaattatagccatcctaatgggtgtgaaatggcgatggatttcasttttacttactgattctaaaaatgtacacgtttgggggaatcacacatattttggattctggaacsagaaagaaatttttcaagggtacttaggaggacactatatgtactacaaggcatttaggcagcactgctgatgrcaccctaggagtgagcggcgcgcaagtctcgtggctgtttgccacactgctcttctctttgggctcgtgaccstctccccacaagggactatttggtccttgcatctctgcaggtgctagcgtgcttgtctgctggctctggtttaacccagaagttaattgcgttgtatctaaaacaagcaatggaccagctgtcttctagaagattttctgtcaatatcatttctctcagttgagttttaaaaggtatttgttttttactttgcaattgtgaaagatttcaaacaaaaatacagagcttagtataatgaagccttgctcgctcagcttccacaggtctcagttatggctaaatgtgccttgtctacatccccactccctccccctcttctatcctagcatatttaaagcagatctcagctgccctatcaactcatccatgaatattttggtatatatctctaaaagataagatggattttttacacctaaaataatactttttaaatatcatcaaatctccagtgagtccatttcccctgttgcctcataaatgttttttaaaactgtttatctgaatcatgagccagatcgtgtatacattgcaattggttaatataaatagtttcttttcatctgtaagttcacccttctttctctctttcccttgctatttatttaagaaattaaataattcagcctgtcctatttcctttagtcttgaccgaacgatcatgttcatttgtcctcttgtattttctacaaaccgagagtgagagggctgatcagcatctgtaagtggtggtgtgtttcattcaggaggcatttaacacccggttccttttctatttatttatttatttatttatttatttatttatttatttatttattttgagaaagagtctcactctgttgcygaggctggagtgtagtggtgcggtcttggctcactgcaacctctgcgtcccaggttcaagcgattcttttcctcagcctcctgagtagctgggattataggcgtgcaccaccacacctagccaatttttgtatttttagtagggatggggtttcaccatgttgccaggctggtgtctaactcctgaactcaggcgatccacccgtctcagcctcccaaaatgctgggattacaggtgtgagccactgcgcccggccctggttccttttcttttggtgaagttagcatccccttactgatcattgcctcagtccattattttcttagaaactgcaagatattctaattctagcattttttaaatttgtgagctgaaatatttctataaatagagacttctctttatcaactgtatggttactgtgagatccagtttgctgaagaaagcaggataagtggtgattttccttatgtaccattttgctccatgtatctgagcatggctctaaacgtgtattcccaagtgtcagtgtatatatggatagttgtttaagtcaaaagccatttaacaagggatagaaactgccttaatttgacggaatgaccattttcacttgggcgtttaaccagattattgaaatttgtaaccagttgggtgaatacttgaaaatagagccacagtacagattgctgcaacagatttgagtaaagcaagaagcaggcacactgtcaggtggcagaaggcaggttctcaggcaaagctctctccacggagcagcgatcttctctctcgttctttccccagatcttgtgaccaggggatgtgctgcagtgcaggtttgagtcctgaccctcagtagctcaggtttaaaaaagcaactccagagagggcctgagggttggaggaggtcttgcttctagatgtgcaatgccttcaaactgttgaaatgatagaaatggagaagcagtcaagaaattacaaagcctgctcagggatgctgcccatagcgaagattaacagctgggccatttcacctggagcgctttttcacgcctctgcttaatatcgtgaatgagtttgagggtagcagaagacactccccagagtggattttccatacttccagttctcacagaaggtgtaggtaaaactgttcgtggttatcactgccaaatttttggggattcaagaaggggagatatttactgacccacttcttttttaatctcatayacatctcgtgtatgtatttttgtaagtggtctcaaattcttttttggaacagtgttgtgtatgaataaggtaaataaaaataaaataattcccatgaatgaaatttggctgggtgcggtggctcacacctgtaatcccagcactttgggaggctgaggtgggtggatcacaaggtcagactgagaccatcctggctaacacggtgaaaccccgtctctactaaaaatacaaaaaattagcygggcgtggcggcggrcgcctgtagtcccagctacttgggaggctgaggcaggagaatggggtgaacccgggaggcacaacttgcagtgagccaagatcgcaccactgcacttcagcctggacgacagatcgagactctgtctccaaaaaaaaaaaaaaaaaaaaaagatatttgttaggtccagtacaatgtacacctttttggtttttttttgtttgtttgttttttgttttcccctggtaggcaatcaaaatcaaacagtgccagttcttttttttcaggaataactggaaatgttaccactgaaagcctaagaagtgggattcagttgaagcaacatggttgaaccatgtggagaaacagacgtttagcttggcataccttaggcccaartagtgtgaacartgatgcaagaacctgtgaactttccctamattcttatgtacagagtcttraaagcccacgatcattgtattattctatgtccataaccactaggtgttattaggaaaaacacttttcatcttcctgggtcatcagtgtcccagacttacacaaagaattatatttgaccaagaccaagtttccttgctgagctcactgaccttgggagcaacagtggtgcctgcagatrgatgtctttctgatggaggtcccaccctatatccttccagatttcagctgggattccaacattcatgataatatggaaataatcagtgatacatcatggtagacattaccatgaagaaactcaaaacaatctttcaaaaatatgcttagcataagctgagtgaacacatagtcagatgtggccttccagaaccaagcctactcagggtgaatcagcactgtgttttcttaggaaaagaaattttattttatttttttgccatatgcctgttgtctcctwaaaagtcctttgaatctcattcatgtttttatgtgatgacccttttccagtttcctaatttccataattctgccacttgtcaggtcacgatggagctgtttctagtgggagcctgcgtccatctttcttccagcacccttatatggattcagtgcttggtgacattcttattaccctttctttcaccagcattctgtttcctcagcatatgacctttrtcagggtggcagtgggcactcacattgggaagcatggaagagttttgattcatcttacaaggacattaagggaggaggactggggagggtcgtctggggaatttcaggaatgtgatgacactaggagcaggaagtgacagctacctgaggacagatgagcccagaaaccctttcccgttccttgctcttggctgaataacttgtgcctggcgggtgtgtctttggccaggcctcacactgacagctctgcagtacagatatgcagtgggatggccacatgatggggaaagcccaatagcatggagtctgtgtggggctctgctttcccacgtgcagaaaatgagagccgccttcccgagcaaatagccagtgcatgcttttatcctgctgccaagacataggtctgcagtgatgcataagaaatgaccagacatctgcaccaactgaatgacaaacagcttttcaattrctgtgaaggttttggtaactgtattgaagtttttgtccccattttttctcccatgtaagacatttttaatctaccttgcartgaagaggctgttaaacacttgtaccagcaccacccagcttttmcatgtctatattaagctacatattataaatatatatatgtatatatgtgtatatatacatatatatatttgttctttacacttaactctgagatgagaaaactaaggctcagagacattgacttccccagggtcaggctactagttaatggcagaactagttaatggcctggcactgagattatttattcacatgttcatcagatggtttatttattgcaacaggaaacaaacaaaaatctctagcagcttatactccagtagggtgggacagaaaatgagataaatatgtaaagcatatggcatgtcagattatgataagtgctgttgattaaaataaagcagggaaagagaataggaaatgctaggctaggttgagggrttgtaatttaaaataacatagtcagagaagtcatgaaggaaaaatacctgagacaggttgttttgcacagatttatggaaaaagtgtcccaggcagaaggaatgcaagtacaaaggccctgaggcaggagtggcggaggcctgtgtggctggcgtgtaatcagcaagggaggaggaggagcagctgaggtcagagactacgagatcatgaagggcaattcacaggtaattcgtgggtaattgtggggactttaacatttattttgcacactataggaagtctagagggtttaaggcagaggtatgacgtgacttttttttttttwaagccaccgtgagtgctctgttgaagatggcatrtttaggttggtgagagatgcagcaggaataccacttaggaagctattgcctcctagttcaatacttttggcttttgaacgtaactacttttaataataatacaaaaaaagctttaggcctttatagaccttctcaaatgccatattttcatagttttgtaaggttttctatccctctgttttgagaatttaaatagcccttttaaatgacacattagcttggctattatcaaaaattcaaaagatggcaagtgttggtgaggactctcactgttggtgggattgtaaattggtacagccattatggaaaacagtgtggaggtttgtaaaaaaatttacaacaagactattatatcattcaacaattctacttcttcatatctaaaggcaatgaaatcactatctcagagatattcatactctcacgttcattgaggcactattcacaacatacaagatacaatgtccatcagtggatgcatggattaaaacctgcggtatatatacacaatggaatacgattcagtcttaagaaagaaggaaatcctgtcgttggcaacagtattgattaacctggagaacattatgctaaatgaaataagccaggcatagaaaaacaaatagtgcrcgatctcacttgtatgtggaatgtttagaaaagtcgaactcatcaaagcagagagtacaatgatggttaccaggggctggagagatgttggtcgaagggtacaaagtttcaattggacctgaagaataagttctggagatcttggtgactatagttaataataatacattgtacacttgaaaattgctaagagagtagattttaaatgttctcaccacataacagtgttaagtgtgtaaggtgataggtatgttacttagcataatttacttattccacagtgtgtatatatatcaagacatcacgttttacaccataaaattgtgtttgtcaattaaaaagtaaatttataaaaagtgacactagcaaaacacagatacacgtccttcctagagagtatttaggtattactattgctttacttgcaggtcaatattacctgcatttttagatagaatggtttgatttaaaccactcagaatcatgttgaaagtgtgcattggatctcatacaaaatgggtcacttcatgagagttgaagttgagaagcacttcagattgtacttctggtatacttggaatggagcacagggcaaaggaacattgtaatgtgatttagaatatgaaatcagtgcttgaaataagactataatgtatcgatgaagtacatcagcatttgcgtctatctcttaactcttttacctccacagaccactgggatagaatgtcagatattggttatcrgccaaatttgggcttcagtcagtgaatttgaagacaggtcagtagaaattctccaaactgtagcacatagagaaaaactattgttatggaatgaacagatcgtcagtgattgggagagaatggcaggtggtgtaatgtatgtgcaattggagtgtcaccagaagcccagacagatactgggacagaaaatgtatttgaggaaataatgaccataaatttgatgaaaaattgtaggggtgtagttaagatgaatgccaaatctagatggttaaaggcaggggtcaaatcaagaccatggtacaaaagattttgggtggggagaaagatgggtataaaacgtgaagacccatcttactcaaagaccgcccctgtttcatttccccactccgaattccttttagaacaaatgggttttggtgacagtgtgttcagatggaatactcacagacttggactcacacctgggttcaaatcccagctctacctaatctaactagttctgggtccatggcaaatcactatagtctgcatcctaggatcatcatttgttcaatggagatagtgatatctctttggcaaggcaggtctaaatggtgtagaatatgtacgttttatagggtggtgatgcgcacatcatagctaggcccttaacagatagtagcttcttctcccaccaaaccagttctttttgtgkttatctggtgtcaccgttcacccacttagctataaaccagattaagaaaattacactttttacaaagggcgtgaagaactatggaaatgataggatcatctttgcatgttagaatgattgctccagcctgagtgtgaagaatggcatgagggtgtgagacaagatttgaagaaaccagattgaagtctctcgctacagcccacacacctcttcatacccttcccaaacaaacaacagtattctcctttttcacaaaagagcttgattttcctatttaaaccacagcctcaactattaccagaagaaaaaaaaaagaccaaataaaaattatctgggtccccttttctcaagagcagagagggcacactctttaatgggttagagatgggggctggaccaggtggtagtcttgtgtatggagtccagtggacagagctgagagtccctctactgacagtccctggattcatcaccaccacatttctaagaaatctgattattacytccccatcagagagagacactcctcgtggtacagctgtgatcatatcattcctttgctggggaaatcttggtcactagaaagattcctgcactccttagtctgacatgtaaggttctgcagaacctaatttcaatctactctcctagccttttttaaatgaacactactactagggccgggcgcagtgggctcacacctgtaatgccagtactttgggaggatcacctgaggtcaggagttcaagaccagcctggccagcatggcaaaacccatctctactataaatacaaaaataagctggccgtggtggcgcatgcctgtaatcccagctactccagaggctgagggagtagaatcgcttgaacccagaggcagaggttgcaatgagccgagatcgcatcactgcactccaacctgggtgacrgagtgagactccatctcaagaataaataaataaatacatgcatacaacttctcacccaacctgtgttgaggccttgtcatctcatcccttactctaaccactgcacaccctcccatrtattcagttgaaaccctactcttccttgaagtctctgtgactttcctcagtccttccccctcaacccttctttgtgcctttgtttatgggataaggtttatcgccttgcattatgattagagattgaatggattacccatctctgcctgtgctctaagctttttgatgatagggcctggtcttggattacttggggcctagtctcaaatataagccctgaatataaatacttgttagatgaatcacgttctttacattgtcgatagaagtgggaaaaattctttttattcatwwatttaatttgcccagagttgcggaagaactaattttaaaagtttaggtttgaatagaggagcaaaaagtcatagagagggacttaaagaggaagtctcaagggaacttctgaaaacttctttgggctttagctgttgatgggccgatgttctttatggtgccagctctcgttttgatgtagatgtctgacgagcctagttttctgggtactcgttggatgagtgacactcggagcctcagagaggagggatgcagggtgcaggtgctaggtgaagggaactagtgtttactgaccatctaccgggtgccaagccatgctgaaaggcagagatttccaagggaggaaaatggttgggagataggaaagtgacagaggaagtattctatccatgccagaaagacgtaaggtgtaaatgastgtgtggcatgccataggaaaaaatgggaagtgtgaaattcctcagattcactgcamagtaactkggggaagagctcatgatgctagtcaagttatttcttagcctctggacctcatggttcctgttatgagatttggctaagctagtggcagggaaccacggcttctagtgttttcttcaccccatttctacagcaggtgactgttcaggtgactataggggaggggtcacatgtgatgaaaacactgagtatctcaaaccagctgtcttgcctaggcctcagttttgaatgtggtagatgaaaggtttaactttccactaatagccctcccagctctgctgttccttctgggatgaaatggagtgatccaggctgatctgctgatgttttactgcttgtcaagaatgctaagaagagggtccccttgtggctgcagattgctttggggacctttcatgaagatttcttcatctgggacctctttcccacatccatatgtcctacattttctcttaggattgagctagagctgagatcattctactatattaatcaacacctactgcagtgtcatggtcattggctcattggaattccatagatctcctacccactctagtagggaaaagcaaattgcagaaaccttagaaaagtcagtgcccatgaacagacacatttaggaaatagaaaattactaaaggatgcctcttcggcaaactgggtgccatatgtgtgcatatatgagtatatatatatgtttgtttgtttgtttgtttgtttgttttttgtttttgttaaggctttctttactttgccccaggccagctggtgtgcatatttgtcaggtcctgttagagctctacagctcattctcagcctgcctgatctcagccttgctctcaggtcctcaggaggagtttgattcttttggacygtggtgctactggctatttaatcctttatcgtcaccatgtccagctagcaaccacttgccttccagcagctgggagaactgtgctggtccagggagctggttttgagaagcctgggcttccacgagcagaggtcattctgtctagagatccatggctcaccagtccatccctggggagcagctgtggctccactgtccttcagagatacagacacagtgaggcacattctgaggagagcagatagtgagtagatcctaaaatgtgttgaatgaggagcagatgaaggagcttggattctgcttggtgacgacgaggcccgtggagttaccagagttgtcttcaagaggtcagagtgttggcaggttgtcataaggaagaggggctaaatttgtcccttgtgacctcaagggagagaattagagtgaaggaagaaacataccaggggtttgattcagtgtaggaatagctttcaagctctcattagatctgtgaaggggaatgggctacttcaagaggcagagggtaatttgagctttgactgaacacttgtttgctgtaatatgaaaggggttatgaagatttccagggcattgaggctagatgagaaggaaggtcccttccaaccttggaattctgattcttgacccctcttggtaaatacatacctggtactcttcagagaatattcccggggttaaggctgaaaaatagcaatgtgtataaagaacctggagctgcattaatcacagtgcagaggtacagtggagtgtacacgtgcatatgagcacattttaaattagggaaggggctgaaaagaaaaattaatcaaattaaaryagcattaggaatgatgtggacagaaggtaattagttgccatcaaatactgaaaatatcaatcaaccgctaattgctatatggtttcttttattagcagaaggtattttcaaattttgtagatttcartcaagagtagggataaggaaggtgtcttgttgcattatttaacatgatgtagattttcagaaaagtaaagagcacagaagataaattgaaatgtttacattttttgccacgtattcatcttccttgttcctagcatcgtagagctgaaatctgtctttgaatcccccctcccctgctctcttctttgctggatagctgaccagaagagacttactccaggccaccaagatggtgtctgggaatgtgtgtccgtggccagggtctggctgtctctcgtccactgagctacctttctagagttgagctcaggatatttctggtctstgcctatgttccaccttctgatcaaggacctacagctatccagctgtagccggaattgagggtccttttgttgccctggtcagaggtttcatcaaggtgcgcccttttgcctttgaagaggccagggagccgtggagaggagcaccttggaaatgcgctgcatgtggtttgctgtttctgtgcccctgactctacgtgtactttattgatatccagtaaatgcccagtacagaaaatgcacctctaatagggtgctccataaaattatgctcccttcccgagatccacgtgaactgcatgtcatttatcaggtgccactgaatctatgtaatgaataatttgatcccacagcaccatccttcaaaccctgtgtctgcacggggaggctgttaattcagcttgcttgcaggcatccgtagtggtccacagagaccagcttctgacgttgtttccagggaggtatagcagaaaggacgtcggctttgaattccaggccttccttcatgggaatccagagtctgccttggttctatctatgtctttgggcaagtggcctaacctctctgaatctctgttttctcatccttaagttggggctagtagcatcttccttgtagggttatcaccggattccacatatacagatatcagtgtgtggctcacagcaggcatttggtggatacaaactcatttattcctttcccttaacttcctttttcttcatactctttcctagaaaacgatactcagttacttgctgtttgtagggaaaattttatttactcactgatcacaattgtaatgtcacagttaaagttgaggagaagaaaaaaagacgaaaaaagatcttgattctctttatcatttccttccacagagccatcagatcattctatgaccaagtgagatgttataaataatttagttctactcattttttacatgacagattaaggcttcagacatcctgctgtgtgactcagagacacacactcacctgcccttggttgagactaggtgtctttgcaggttttgggtgacaaagacctggctggtgatactgagccaggagatggtgagaaggtcaatatatgaagacgcattaagcttttgcaaagctgtgggttcagaagtagccattagagagggatcatctgagttgggtgataaccaaagagttttatgcttgagaaatggagaaactggctcaggaattctgtaggcagcgtccagagaggctgctatgaggctgcagtatggtacrtttcatctgaggactgggggccggctctgaggctgtaccacagcatgctgtgattctcagagatcagggtgaccagaggagcagctctgacctcgagtggactgagaggggatttagagggtgtgcctgcgcatgtggggagggcagaggtggtgcaggcagggagcctaagagaacagagtggacacgaacgcttactgagtacctcatagatgaaatcccctcagtgactgtgaataatattctctttactcctagtttatagatgagaaaaaaaagggttagagagtacagagaatttgcctgaggccacacagtaagtgtttcagcacgtaagtctgatggaaatatgccccattcaacacttctgaatccacgtctataatctaggaatttggaagaggaaagggagaggtgaaatgggagctctttttctttctgtgtttgactctgcattccccgtcctccccatataatcagtgaatttccactttcgaagcctcaatggatgggctgaattctccataaactggcattcttctttttaggaatccctccattatgaactacactacattgataaagatgctctgtgaaaatttcaaagtgttacagtttaattcagcagattttttccacccgaggagcctcatacgtgcaaggtgcaatgcatgctgtgctatgtgacagaatacagtgtccagggaggtgggccccatgttcagagttctctgcagagagggggttacagggaagccagcaggcattccatagggtagactatgtacgtgcctgagttaagggggtttggacatgctttggggttttaagaagagagctttgtatctgattgacattctggaaagacttaagggagaaggttataccggaaatggcactgggtggatgggcagggtttcctcaggtggagatgggggtgtaggaagtgaagtatgcacacagtcaggagggtggccataggacaaaggttcaggttggctgatggtggggtatggatgttagaacttcaacaactgccctcattttgtgggttataaaagtaatgcatgctcattacagaaaatatggaaaatatatgaaaatacaaaagaaaaccagaggcaaccattattccaatattttattgtattttcttccagactatctgtcagtctgtataaacatttttgaaaaacttcttttgacagttggaatacatacttcttatagaaatttggaataaactgaagagcaaaaagaagaacataaaaatcacctgtaatcttagtcagtaagattcttaagactgtttaagattcttgcatcttacctatttgtgggttwgttgttgtkgtggttttaattgagatggagttttgctctcgttgcccaggctggagtataatggcgtgattttggctcactgcaacctccgcctcccaggttcaagcatttctcctgcctcagcctcccaagtagctgggattaccagtatgtgccaccacgcctggctaatttttgtatttttagtagagatagggtttcaccgtgttggccaggcgagtctcgaactcttgacctcaggtgattccccccaccttggcctcccaaagtgctgggattacaggcatcagccaccgcacccagcctgttctgtagttttaaagaaggaagatgacaggtttgaaagtgcatgagatggagactgactggaagggatgagaaaggcggcaaggagggagctgaggcgggcggacagggaggagggctgcagtgagggagctgaggcgggcggacagggaggaggctgctgtcaccgtctagctgggaaaagaaagtacataaaatttgagagactggaaacggtttcatttgagatgagtaagagggaagcacagaggggactcccagcttttctgtgaaggatctaggaaaatggtgatgctgtgaaaacagagacagaagatattggcttggtagtcagcttggtggtagctgtattgaatttcacgtgtcagggagccccccaggtggggatccccagcaagagttggaaatgcctgtcttttttaasctttctcaggtgggtggttaggggtttgacatctcgatttaagtcattctcagatggatgatatgtggtttgaactatatagaaagaggctgctctaagaatgtgaaaagggtcgggtgcagtggctcacgcctgtaatcccaacactttgggaggctgaggtgggcagattacctgaggtcaggagttcaagaccagcctggtcaacatggtgaaaccccgtctctactcagaatacaaaaattagccgggcgtggtggcgggcgcctatagtcccaactacttgggaggctgaggcaggagaattgcttgagcctgggaggcagaggttgcagtgatccaagattgcatcactgcactccagcctgggtgacagagcgagactttgtctcaaaataaaataaaaataaaaataaaaataaaagggtaaacakgaaagcgtgaagtgtatactttacagcaagctaaaacaggcaaagccagtttgttactttgaacagtcagcagctgtgacggcactggggaaagtgtacagtctcagggtggaatggctgtgccactcctcctatccagcctaactttctaggatcccaggggtggaggctgccctggaaattgttgtgtacgtggctgtgttctgagtgaagtctaaaagcaggggaaagagctggaagagagggagcatttggataagacactgaaggaacatgcggtaactgcacatgttctaatgggagcccagcctccctgttggtttccactctgacaagacagactgctcttcctaccccatctgttgttggagggtttgttattcagtggtacccttagtaggcagaggtggagagtggggcattctagttaacaggagtgtgctagttagcaagagaatggagtgtactagttagtagaayttgccctagccaatttatgtagtgaacccataggacatgtcagatctggaaaactgcctttcatgagtgcggaagatgtagtggtcggcctcttaggtatttttagagaatcacatttgaacaatcacaatcacagatctttaccagtcaggtcaaaatttgsagtgtcaatgtgtttggaaaagggctttatgaaaatttgaactttctttaargttcttcctgaagatttcatatgagaacccaaatcttaagggaaactaaaatctcataataaaaaatctcatagacacagatattcatgagtaatgacagattaaaattgtgagtagaaatgcaggaatcttaaggtaattctaaataaaaacaatccagtaggactattggaaaattcttaccaagtaatgattttgtaatgattgtgtcaaaaatgtaaatttgattcagtgacacagttgtaattttgatatgttctttaagtctcttaggtgcttaagtcatgatgtaagtttgaatatttttttccttcaatttaaaactttatttctacggaatgtaratgtccttcagaagttcctaggggaggtggtggtggtgacaggtaaattcattgtgtctatgacttccaaaggccagttttcagaccactgtcatcagtatcaccttaggttaaatattttgtaaggaacaattcagatatatcccggaagaggtaccttttatgctttagtccaggccctctgggktttacctgtttcttgttgtasccactgctgcagcagggaaccctggaaactctaatcaccttcgtgtaggtacaacttgaaagtgcttctctcttcttgccttctgcccaaggtgacacacccatgtgtgtgcaactgtgaaaatgagcctgcaaactcaaattctaaagaatatgaataatgsaaagaaaggaggcaacaatatgaagaaatgaaatataaattgactcgagttaattttttataacaaacaaaagcattttaaaatgtgtgtttaggatgttcaaagaggtcagtgaagaaataataaactatgacagaaaataggcaraataaaagaactaaatataaaacttggaataaaaaatagctactgaaataattccatacctggaactcttagattgaacccagttgatgaggaacttagttaatgttttagtgaatagttctgatgcacatagagcaggaaaaagaagaatgtatctatcaattaatcagcagttaaatgacrcagaggataagttgagatgtgtcaactgacatgtaaagggagttctggagaaatagaattgcgagaatagtggagaagcaatatttgagaatataatagctgaagactttttagaaatgaagatgtgaatcatcatattcaaagtatattttaagccctaagcaagataaataaaaatgaatgacatctagatttataataaaccccagaatattaagaataatgaaaaaatattaataactgtagaaagaaaagacattgcctacaaagaaatgaccatcagactgacagcaggcttatgagtgccaatgatcgtgagaagacaatggagtaacatcttcaaagtattgatgaaatgtatacccagctaaacttacattcgatagtatagacataatagaaatatttcagatataaaaagacttaagagattttataactcatagacagttactataaaacccttttaaagatatatttcaktaagatgaagaattaaaggagagacctgaagcataagaaacagtaattagttaaacaatgattaaaatgttgatcactgaagcaattttaaaaaaataaccctctgtgtgtgtgttagaagaaaataaaaaaggcaaatctttacactgcggtaatgagatagagattgttcagtgtggcgggttttgagtttgggagaaggttagaaatactaactttagacttggtttggaaaacatagtgaagtgggtatgtaacaattgtaagggtaaacactagaagaacagatttttttttcgttttgcctccaaattggccaagggtcaaaggcagtcagaaaagactaataggagagagaaaatgagggaaaagaaattaaaggaagaggatggtaagtagaaaacacaaaatgaggttatggaaagaagtttaaatagccagagtaaatatattaaaattactaattagaggaagagattatcaaattggctaagaaccaaaatcctgttatatgctgcttacaagaaatgcacctaaaataaagacacatggaaaggttaaaaaagaagactgggaaaacatacgcctggtaaatgaatacaaaaaaggtaatgtaggtatcttaatattagaaaaaataattttaagaacraaagactttaatagcattaaaaatactaaacaataacaaaaggaatagtagcaagaggataataagacttgtgtatgctaatagcatagcctaaactgtgtaaaagaaaaactgacagaactaaaagagaaatcaaaaaattcacaatcacaggaggaaattttaattgaatctctaagaatcagatgtctcaatttgccagaaaattaaacagatatagatgatttacataacaaattgataagcttgtccataaatgtctgtaaaaccctgtacctaagaaacacatagagagaaattttatgcttttcaagcacacatagaatagttacaaaaattcaccaggttgtaggtgacaaaataagtctgaacaaatttcaaaataatgaagaccacattctctaacatgatgcaatcaaatcggaaataaaattgtgaaggtagtataacaggccatatgtttgaaagcaaaaatgtatacttttaagtaattcatggattaagaaggaaatgaaatggaaattacatcagaagagaatggcaatgaaagtactacatatctatacgtgagatgtatytagaacaaaccttagaggttaaaaacatgtattagaaaagaacacttgaaaataartaagctaataattcatatcaagaaggtaggaaatgagcagactaacagaccaaaaagtaaactgcaaaacaagataatagtaaagaaagagcagaaatagaaaacagaaaggaaagatgataaagagrwtcagtgaaacccaaggtttgctctgcaacgaaaacctctaaaaagagagatataaaaatatgaatacatgacaatgaaacaaagcatcccctaatgattctcttccttctctccaaagtccaggtgcttcaggaaattttattgtaacttcacggaacaaataattttttttctaatgcggtgttacataggagagaaaataagaaaggctagccaaccaattttctgaggccagtataaccttgataccaattctggacaaggacawtataagaaaataaagttataataaatcttcataaggaacgtaaatgacaaaatctgaaataaaatagcacaggtagttcagtgttaaaatgctctatgagtaggtaagatttactgaaagatgatttagaaaaatctgttaatgtaatatactaccttaagagattaaaggagggagaacatatgatcatctcagaagaaagcatgcattgttaatattcagaactcatgcatgataaaaagcttttcaaagtaagaatggaaggaaactttctcaacctgrtaaaggatatcttgcaaaaacctacagtaaatctcatatttattggatccttcccactaatattaagatgagacaaggattcctagcattgtcattattcagcattgtatggaaggtcctaggccaatgcaatacaatgagataaaggcaggagaataagaatgggagagggagacagaaaactcatttgtacagaatataactttctgtataggaaatcaatgagaaggtggagtcaaaccattagaactaatagaattctctactctttctggctgtatggaaggyatactaaaatcagggtgtttttatacaccagcactaagtaatcaaaaagtatagtagaaaaaacagtatttataacagcaccacaaatcatggggtacatagaactatatgtaatacaaatatttaagatctttattttcttgcgatggagtctcactcgctcactcaagctagagtgcagtggtggaatctcagctcgctgcaacctctgcctcctgagttcaagcgattctcctgcctcagcctcctgagtagctgggactacaggtgcacgccaccacacctggctaatttttgtattttttagtagagatggggttttactrtgttggccaggctggtcttgaactcctgacatcaggtgatctggctgcctcggccttccagaatgctgagattgcaggcgtgagccaccatgtctggccaaatgcttaagatctttatggrgaaaattataattataacatggtattgaaggacatccaagaagacttgaataagtggagagctatgttattgttttcatagtagtaaaataaaaccttgcgtaagtcctcattctaccacatgttaactaaccctctagctgatartacaaacactcactgcgggattttatttataagggctctagaataaaatatgagttattcacactaaaatcacctgttaagtaatattctgaactagttaatgcaggttttcattgtgttgtggttggtctcataactaggttgagtttttctcctctgctaagaggaaacaatactgaagttgtttttcttgtggcatttgtattataaaaacttggtgtgggggtggagcgcaaagctccagcccactgaatgtctgccagttaagatgatgttgggttaggttacatctggctactgtcckgggaaaatcacttttatagagatgggcttccaggtggttttaaaatttatctttctattgacatttgtaggtcaattatatatgttgactaaatttacaaataaacttgtgtgtccaaaccaaattactaatatgacaaaatatttccaaattcatctaagttcaataaaattctatttaaaaattttaaaggatatgttatggaatttgacaagctgatattaaagctgaatagtaataggccaagagtaacaaagaaaaatttgaagaagtataaggtaagaagacttactctactaggtattttgactcattaaaactagcctgattacaaccgcctgatcttttcctacacgtctgctccatccacaaggttccccacttaagccagtaatcttcgagtcagccataaccctctctttctctcaaactctgtgtcaaatctgtcaggaaatccttttggctstatcttcaaaatatatccagattctaatcatgacycatgacttcctccaccaccacttggtctaaaccaccattatctctcacttggattacagccatagtttcttaaccattcactgcatctgtgcttggttcactctagtctattctcaaccgaggacagccagagtgattttgtaaaacataagttttatcatttcctctcccgctcaaaactccaatgtggctacccattttactcagagtaaaatccgtagtccttaaccatcccacaaggtcctacactatctggcttatctgatctttgtcctgctacttcctccttgtttattccactcaagccacactggcttccttcctgccccttagaaatagcaggcacattcttgttgcccctgtaggactgctttctctrccccttgctggggatatctgaatgggtgagtgcctcactgcctccatggctttgtttgcagtcaccttcccttggaggctcaccctatttaaaattgtgctttcccagcccacctgatctctctgacctgctctgcttttcttttcattttttatagctcttgttaccttcaaactatgtcatctacctaggatttttggtgtttttaatctttttcccactagagtatacacactaaacagggtaggatcttgtttgctttgttcactcatttatcctgggtgcttagagcacttcctggcatatagtaggcactgaaaaaatatttgttgaataaatgatgaaaaaacagtataggattggtgcaggaatagacaaatgaatggagcgtaacagaaagcccagaaacgggactacttacaacgatgtcatataaaggtaacattggagataagtgggagaaataatggattatttaataacaatttatttgggattyttggttatgaatatggaaaaaagtaaactgaatccccacctcaccccctacataaaaattatttccatatggtctaacaacctaaaattaagcttaaaattttaaagcttctgaaaatataggatattatctttatctttatatatggatggacttcttatacaaggtacagaaaacataaatgataaaggaaaagatagagaaatttaagaacattcaaatttaaaacatctgtatgacaatagacataagtgaagggaaaagcaaatcagatatgaggtaatatctgtaatcatataactggcaaaaaatagcattcaaaacataaaaattgcaacaaaccaagaaaaatagaagaacccaatagaaaaatgaacagaggcactttataaacgagtgtacgtgagtggcccatatactatgtgaagagatgctcaacctcagtggtgattagctatgtatatgacataatttttttttttttaagatggagttttgctctgttgccaggctggagtgcagtggtgcaatctcggcttattgcaacctctgcctcccaggttcaagcaattcttctgcctcagcctcatgagtagctgggactacaggcatgtaccaccatgcccagctaatttttgtgtttttaggagagacggggtttcaccatattggccaggatggcctcgatgtcttgaccttgtgatccacctgccttggcctcccaaagtgccgggattacaggcatgagccaccacccctggctcgaaatatgattttaagcccatccaattggcaaatatttatatactttgtaacaccaaatgcttgcaaggstgtggcacaacararatcctcctacactgcttataggacgattgtacctggcaaactccttttgcctacttgtccctgtagcagtgatcccagagtgcccaggcaatagctgtatcttataactcaatggagtcttgctatattcccagataaaagtgtactgttttggggactaggacctctaactctacagagccaagagtgtgggaacaaaagctacaaagtctcccratgggtccctgaratagtaaatgaagtcaatcctgtttctctcctttgctttccaaacacgtgtattattcatttggggaacatggtgtgtccctacctttggagtgtttgattcagtgtcctggagtccggcacccacctgcacrgtttgttcwctgaactggtgctgtggctgtgccttggggctattccagtgctttttcaggacggcagttcctggtgacgtgcagtaaaataaarcaggtggaaascagctgtgggctcactgctgcattttccttgctgcaaagtgagttgcttggtctgatggatgttatttaggggacagaagttggccaagaccctgaaggcaggaaagtcaaacacgtgccaagaatacatgtatgtgagtgtaagaacacatcactggccctttcagcatggaaggggcccggtgtaatcctttgccaccttatggtgggttggtcctctcaaggagtggtgctgtgtgaggcacttggtgacagtctctgttgctggccatttggacatttggtggtggcagtagctaggtggaccttggtgagcgggtgtgcatgctgttgggccatgtgtaacctatctctgccattgtggccagttcgttcctgcatccattacgcaggtactagggtagccagtgaagacactggctggcatcccctggctgggcccctttccatgctttgtggatgagtgcctctttcatggtagatgccctctggctggcattatcatgtggtaaagagatcttcatgctgcatactcactcccacatgtccacctatgtctctctaccccagatttcctaattcttcctcttccagtctttgtgtttctggcctctgactaggcagccaagccacttgctgctgcccttgagtccacagctgtcctgaacttgggctattcttccctctctgaaggaaccagttgggaggatttttcccttacccctgtctttcctggccactctagagtaaggctgcagtggagctgccctrcatttccagcctgcacccatataacaaaccaaccattcaacaccccaccccccgcacccccatcccccaaatcggcctttctctctgcccccagctggttttacaggatcgccacacagccgtaggtgcgaagtgagggagggagttggtgcagcctggtgggtgctgggggagtctggcttcctattcgtgcasctcacgcgtgccctctggtcctgcttgtgcatgattcccgatgtacaacttcctctttatgatagactgtggctgtagccccttgaccttataatctggtgggtctgatgggacttaccttttgatgggaaatttcagccacatcatcccctagtgctccatggctgccatggtgtgcactgtgcagtgtgcttcattatcacccatgtcatgatcttgaagtgctttttcccattaaactaggcttcttggtgaaatggtcgattctgggactggggtaggaaatgtgcaaggtgagtctgggacatcctgtcaaaccagagagcaaagaagctatgagacaactgaggagaaggagccaatttgaagagggtctcactggccaaagatatgactgctgaagcttacatgagrgcagtcattgaaacgatcaaatatgtttaaatgaatatgtttgtgatgatgtttaaaaaactcttcgattagcctgggagatagcaagttcgtcatcttgaaracactatgtaaatggatgaagcaagcatttatcttccctgtcccatgtgaattgtaccactgagtaacaaagtagtagctgaggggaagcttttcattataaggtatgaaaatgaagtgatagaattagaagatcactattttgcaactctccaggaattaatacatctaggcattgagcacccatcaatgctaactagacatgaaagagacaactagacattttgtgctttctmatcaaagaccatccatagccccacctctagtcttgccagaggatcaagtctgagtctgatgaagcctctggatccaattgtcaacttgcagaaagttgtcctctgaggacggttgtgtgaattgaattgcaccatgagaacacagtcctcagaatccacagtgtgagaaactgaacaggtcaagtagactgtgatcttcaagggataaggtcaaaggaaaagaatggagacaatgtgttgattaaaatgacttaaagacagccrgatgtggtggctcacgcctgtaatcccagcactttgggaggcggaggggggcagatcacctgaggtcaggagttcgagaccagcctggccaacatggygaaaccccatctctactaaaawcacagaattagccgggcatggtagtacgcgcttgtaatctcagctactagggagggtgcggcagaagaattgcttgaacccgggaggtggaggttgcagtgagccgagattgcgccactgaactccagcctgggtgacagagggagactccatctcaaaaaaaaaaaaagaacttaaagacgtatcaaatttaaaaaaatgagcaagactataatgtcaggggtggacacttagatgataaagtgtaagaaacataggaagtgattactgtgaaagtcagataacggttgctttttkggctataaggtttctgttgggattggagtgtagcacacagggaggcatgtctagggtagatggcaaacttctgattcttgacccaggtggtggttgtaagggtgtttgcctaataacagtgcattgaaatatatgtttgttttgtgtggtttttttgcatcagttttgttttataacaaaaggctaaaaataagtatttaaaraaaatagtgcatactatattttatttgctgatattcataatgatcaccagattattgaaatttatgagtaattttgctataaataagcctgttttctttgtttaaacacacacacacacattttcacactcacaccttcaaagccacataatagaatgtttagcttaaacctgcagccgctagttgaaatgttgcttcatggagttttatcctcctaacaacctgtgtcctaagtcacattcctctccagaaatgtggacattgaccatattccagtccctgagacgctgtttcagccacacgtggcaccccagacccttgcccacctgcatcctggtcattcatcctcctcctcatggggtcatttcttgatccctattaagcattaaaaggggattamatatctctctacttgcagctaatgttttgcttggtttggccaagaacattttaagttttaaaaacctggggctattggagtgggaccatgggcaaaggtcaggacaggctagctactaaaatggcctgccacggaccttgtacgtgaaggttgaaggattctggtgctctctggtgccatcgctgttagtcgttgtgcagcacagaaatattttattcaacaaactctgcaractcctgaacttyaggggtgggctgccttctgcctggtgctctgcacagatcctggagctctcgtggtcatttatgtgcagtgaagctgctccactcacctacagcttgtccttttccagagaatccctatcatcctcccctcatcccaaggaatrcaacaaaggaaaattaatagtgaatgcttttgccggagacctgtggatacttaatttttatagatactcaataaatatttatttatattcactagcagcaagcaattcacttgtaaactggtatagtggcgggtaacataagcataagcagattcttatgttatttctttgaatattttgcttttctttaaaaatgtaaattttttattcttaaagtaataggaatttattacagaaaaatttgaagaatgaaaaaatattcctaaattgtcaccactgtaatacagtagtggttattatcactttagtatacttagtatattttcttccagtctaattttggtgtgaaaatctttagtagttataataaaagtgcatgtaattgtgttttttcctttttactttagccttaggtaattatgatatcacaaacatatttccatgttgcaatattatcacaaaataattttttactgcattaaattttattatttggccttatatttttattttaacctatttttgattaacacattttagcaaatagaatatctttgtataatatataactttattcaaattactttttgggttttgttgctttggatttttagagtagaatattaaagagtgtcaagaatttcagtaaacttctaatttatctttcagctctgtcgtcaaatctggtaaatcgagtgagtgtaggagtgggaggtgtatagtgtatattaatttgccaactgttgttccactcaggatctcagttatacgtaacttcataaagccatataaaatttgagtgaggcagtaatyttttttacatytagaagtgggccatagaacaccaattgtactggacagtttagaaacttatggtacaaaatgaaggttytgtatttggagcccaaggaagtgcatggcaacatttgcgacgtgcgtgagtgtgtgtgctcttgggagatgggttgtgattttcatcagatgttcaaagagatcctgtgcccactggtatacacacaatgtttgctagttgaatggagtgctacttttgtgagtttgtttattgttgtcattctytccctgcctcccttccaaacccttctcctgcgttcattatatccagaaataaaactcagaaaaatttacttttgggtaagcagtgatttatcacatgcaagtttatagtgattaaaaaaatgaaaactaaacacatatgtgacattgttaattggaaatatgcatgaatttatgttgattttggaagttttcacattaaaatgggtaacttagtgctatactttggtaaaatatttttttaaaaatatgtgaccagggagtggatcattcagtaaattttctattgattcaagttatgaattggatgtggaaatatgaaaatagttacccccttactgtgttatttggaaatgtgtagatttactaactcctttaaatttgaggccttctaagtttttgcacagctaaagcaaagagatattctatgcaaataattgtaaataaaattatttaccaatgttaagaactctccttctttaaaagataaaatcttagtcatttttggttatcaaatgacaggagcaactttttttttttcttcatgtaacaggtgtatgtggatgtgcaatgaccactttgttttgaataatcagtatcctttttttttcttttttcttttttaaggaatgggatgtttctggggagctgaaaggaaattctgggtcttgaaaggagtgtattcaactcaagttggttttgcaggaggctatacttcaaatcctacttataaagaagtctgctcaggtaggaagaatttgctttattgtattactaggagaaacaagggagggcttgtcactactgttgggtgacaggctctttaaaatggaaatatgtttttttaaaaatgtttcttcaatctttattatttgtgtatatatacttgtgascttctcactttatatgtttagaagatgataatcttcctgtggagtgcaccatttagcttttgctgtggaacaaccactctaaaacatggtggcttaaaacagtcattttattagcttgtaattctgatgatcagcagttgaggctgggctcagctttatggttcttctgttagcctcacctgggatttgctcatgtggctaaggtcaacctgtgggttgcctgggggctagtcagcctaggctgctttactctttggcctggcagttggtgctggctgctggttascactaactgccagstggggtaatggggatgatggaccatatgtcttcagcacactggcctgagctaattcacatggtggtggatgcagagaacctaagagcagcaagagaggatgaggcccattctctgtttgtgttacgttcacttttataccattggccaaagcaagtcatatgcgctagctagaccagagccaatatgggatggctccccaaaggcaaggatataggaggtatcaagaatcgggaccattatttcaacaatctaccrcatgagacagacatttcagatactggttgtgttttctgtaaggaaaaacactgaaagccgtgctataatgcagggatcagcaaactattgacttgactcataggccaaatcccacttgctgcctagcaaactattgacttgacttataggccaaatcccacttgctgcctatctatataagtaaatttttgttgaagcacagctattctcattgttattattatatattatctatgagtgttttcatgctacagttacaagagttgagtgcttgcaaccaactatgtggtctgcaaagcctaaaatatttaccgttgggtgctttacaggaaaaaaatttgctgacctctattctaggctaacagggtaggcagatgccctcatggcaaattctgtctcgaataccarattacctctctggacttgtttctgacctaaaggatttcctttcctttcctgccagctcagatagcatttgaaatgtttttctaaaaaaaattatattcaccattttaagaggtcttaatagggagggagtatctggagttatagtccactattattgatgaaaatggggtgtaaaatgtaaacagttttatctttctaaaataaagtcttaaataagtgtggtttgtggaggatgcgctcagccctccragggcaccatgaatgatggaggggaaaagctggagtttgggagcttggtgaatagtgagcatgttgatgtgtttgctacaatatgaattctattttgaaataaaaattgagctgtacaacaatgaaaatattataaaaatgtgcatgttcttattttttcttgctctagagaaggattgaaatattctgattcgtatggagaatgtggtgtaacaaacaaatattttaatggttatcctatttttttttaacttctgtttcaaaattaaacgcttatgcatagctataaatagactcaaatgaatcctggagatcacccaggtgtatcctctcaagtcttaggaatggaaatgagtagattccttcctgtaattccagacgtgacttaatggcctaagagaaaaaggttgctaaraaaacctccaagtatctattgctttatacctattatcctcaagcagcaaaatgttaacaatcagttagaatattgtgattccttgtttgctcgaacccttttcagttcagctgtttaccttaataacaacatgataattgccatgtgttaaactcatgctatatgccagacactgtaataagcactttttctgtctttgcttttctctaagcagttccatgaagtatgtcagcttctatcttttacagagggagtgtagaggctcagagaggataaataacttacctaaggtcatacctagcaggaatccctmcctcattagctctcagctcaaagtctatgccattgaccatggtgtaagtctcccagctgtcatcatatcccagccattctccattcatccctttgcactttcttccaccaagtcacaaattctctttcatatatgtccctctggtatatttttaattatattagtgtgcttttaaatgattaaggagaatgccaaggaaattcttttgtctttcttatgtttagaaggaaaaagggccaagccagttmatgcaaacagctggtatgttagaggcctctagcaagtggtaaagtayggaaaccacagagactggtaaagaactcgattggatatgaacactacctgctaagttaacagtagcattgggaagcatggttgtcatggaaacttgttcctgattggaaagggatagttatagggtyttacccatacacagaaggagagacgatttctttccctaggcttttttgttgttgttgttctgatcataaaagggaaaaacaaaaaggcagagaggagctatgatagaaaggtccctctggcacagaagtggtacagccttcagatccctgggaataacagggaaggagaacaaataaggtccctmgctagagtaattatggtaasyagctaattaaagatttttgaccaaggagaggggtgggggagacataaagcaggttacactggcgggcctcccctctgaagcctctggtgctcaaagccttgctgaacaagtcagccctggagtggtctgacttaagagaaggaaaataaayaaacaaacaaacaaaaaccccaaggctctggtaagatgcatagtaattgctgaggtccattrtgggagaaatactagtctgtactctagtatctgcttgcaattaagtttgtaaaactttgatcacaatccgtgaatattttgtaaagatttttacttttattttgtcaagaaaagaagcatagagacctggattgtgtgcagattccttctctcataaagcggtatgcttgagcttaaggtaccatgtggtttcttggggcaratgccaraaatataggaggaggggttaacagaatccacagggccagctttaccaccgctctgtgcaacctcttatgtgatgacgcacatcagagcttccacaagcattatctcagcacacaggtgggtgaacacaggccaaggaaccatcggctcaagtttgctacccctgctgtgccagtgggtctkcacagcctcaacaggggagaagtgagcgagagagtgtggatgtgagtgtagaagcagtgtgtgtccagagagggtgtggattcatrtccgaatggtatttctatgtggaaattgataggccagtgactctgaaccccaaatcggagttgtgactaggcatatagaaaagataacatggcttctcatagtagctgagagaggaggtgtscccatcgtgggctcactaatggggctgttcatggtgggcagtctccattgcttggtgccacttgcacccgacatgcgtagagaatacaagggggcggtctcttaggaatttagaataaagtcgcccattgagagtggcagtataaaatcagcctgctctgaatcacagtggagatggacagtcacttggaaragagattggtttctgtgtctgtaggatttcagagtaacctagtggaatgccytgactgtgtaaaaggagcataggtcctcagtaggaggttggtgagctagaacagcctgggagaggggaggtcctggccactctcttgggtgttctgggcagacccacagagcctgataccctggcacttttaagttgtatcactaacctcgtgttctgatccatactctgtaaaactttctaatcttttgtcctcctgtggggattatttacagaaagaaaatgcaatgaaatcaggttagtcaggcagacagttctaattcttatttagaattcaataaaatgcctctctgagatayatatctcagtctattgtgagtttagtctgcacaggtcattctctccaaattgagttaacctcgggctgagttatatgacaaaaacagagttttggtcggacctccatgatcttccaaggcttcagttgcctcctgcatttccctggagatttcctatcccttgcatgtgcccataatttcatttaaacctgttttaaaagtgtatgtaacttttaagtaayctataatcttcccttcctcaggttcattaagcactgaaccartagygcacaggctgagaaacttacctcacccagatgttttgggcctgaattctaacccctctgaaagccacccaccaccagcttctgcaccaggcacccagtcttggctgggacacagggtagcatctctcatggccagcagacctctgttgggccatgttctgatgcatttctgatctgtctctaagagatgtgctgagaagtaattcatgtcttagtggccactgttttgtacctaaaatgatgtccaaagaktcatccatccatttctgtttcctacaagctcagcatctggctggcactagrgaacccagaacstggactggaatagccatgaggagcctaacttgtatataggccttacttgaataaattaaatatgccacttactggaaaggtgccacatgtaaagcattgcaccaggtcctaggggaaggttggttttgatgtaaagaatactagttcctgtcttccagaattttctctatagtcaaatgaaagcttgatctttcacatttgttttaagaagttgggctgacactggttttctctttacacatgcacacacacacacacaccctcaaacagttgttatgcaaaccaactgattaactggcatgctgttgctttactacattgattttagaagtaattgagctattcagattcctgaatactctgatagagaattattcttacattttgtaataacgactgtacagatgaaaatatgaaaagacattctgcaatggataagcattctgggttaatttcagtgcattagcctaatatacaaataccccatttctggcaagaaaacccaggatgttcattcactgggtaatatcttttcatattttgcttacagatgttcagaacaattccatgtttattagtctattcaaaagcttttagaaatctgcacagccaagtggcactgaatccagaagcatgaaaggagctgcacaacttttcctcgtaagatttacacaagcagcacgggaaatctgaggcccagacatttccttatcaacagaatactccggtggattttcaagcaggctgttcagcagaggtttcgagcaggagcccaggtgtgggaagagcggagtgtgggagtcctcgtgtgaccctctgggggtggtgatggaactgactgtatggtctgcaaaacctaaaatatttactgtcaggtgsttatgtgtcctgtcctgagcccgtttcctctcttgtaaaatggagcaatgctgsttgatgaaaycagtcaagttgtggttggattyttatatgtaataaacctgcacattgtgcacrtataccctaaaacttaaagtatgataaaaataaaaaaaattgttgcaaatctgagtatttgagaaaatctgggatacacactttctagctcttgggctcgttaaagatgaacatgatggatcatgaagcattgcttggcagggctggggccagcttgtggtaaktatgcctggcacagcacacggaacccgttttcttctcttcttcatctgtgttcttaggaggtcaggtcatgtcacccccttttccaaatgcgtgtgatttttttccttgatgcttgagagctctaactgagcaaggaataataatttccccactaatgtaagacaactcagtatacttttttttttttaagtttgacttaatttctgaagtgtttgggtggaagcgcatgtctatgtatcttacatgagatgaatgatcccattcttcagagtagggatgagttctcttattaacagattttatcaagcaatgtaaaactcattctaaattccttgcagactgcattaaatctctttttagtgcatagtcagtcttattgtactcatttcaatgtcagtcaaggtaaattactaagttattgacatactcctgaaaatgcaagaattctggtgttcagttcttgctacaagcaatttgatcgctttttattcctcttattttaggcgtaaaattggaccttaaacttgtagcaggcaggataaaaacgsttatctctctcaaaccaagaggcagaaagcaggsttcaagagcagagacccttgactcatacccttaggaccaaagatatctgctcacccaaccatyttccccacacccacatccaagcagctatgcaagacagattagttcagtgaatggacccattgcctgaagaaaaagtataggtaatgagaaaacagctggttttgtttattgtaaacctcaatcaccagaaatagcaagcttggcttctctaccatcggcacccctctgaagggttgacatggtggggggggggggacataggtcatggggacgtcaaggcatttgagacctagaagggccttaaccatcttccaatacaacagctttcaaactgggtgaccatggaaccctcaggctttcagaagggttctgcaggagctccagaggtaatgatgtttgaamtcggtaagattcaagctgsttggagaggccattcacagstttcagctgtattatatgttgatgtcctgactaataaccttattttgaaaagttattaagaatgttgggaaacctccaagactgctttctttgtcgagtaagggaactgaggctgagagagatgaagtgatttgagagattttattagaagggttgaaaatgtgcttgtcttctcagatcacagtgtgactagaacacccaaaagaagttcgaatcgtacacccattctgctcctctcagtgaggtggacagtcaaggattcagagtaggggtggctttggagtgggaaatgttaaratgtgaaragatcatagttttgtcatttggttcctgtttatsatttctgttaggctggattttttcaccagtattgagtcctggggtttcctgatagatagttcttgtgtctgctagatgctttaagtcctgtctgcgatggccagtagcagagctaagggtgtgacagtaaagagcgcctgcaggagcccaggacttaggactaagaaaggaagtcattgaactggggagtggtatscttgctccctcacctccctccctttcaagcttctgcaaattggcttcctggcctgggctggggactgcctgggcctgcagaatcagggcaagtggactgcaaattgatttgtccacgaagcatgggctgcagaccttacatataataasctrgtacgcacctgctccagtttacagtatacaagggtgatggcattgcaataagtaaaacatgcactcagccagtgctattgaattcagagcaatttttcaccatcacataggtccttcatccaccggttctaaaatttgagtgactctatgggggttctctggcagtatctaggcraaatcatgtggtctctcatactcacrtaggtatgaaccctgtatgctgataggtagttcaaagttgaaaccaaagagacgtgcacattttgctagaggtatcccaagtttgcccagttatttaaatccagcattagacatcagagaggrtgaggattttctatascttcaaataactgaaggctggcaagcagcaaaacatagggccccacaatcctgctgtcctcgaatggtaaaaagaggcatttagtgcctttccttccccttcaggccattggctaaagactccaataatgtcagggtctgttctttgtcattgaagggcaaggggtgagtgaattggatggtttatggactctctaaagactattgcatgtgctacgtgttcttcatatgaccttgatattttaatattctatagttggtttggctgttcaactcacstctctccttgaacagcttaaatcactgctgaggaacaggtgcagcggtcaaaggtcaacagactgacagactttaagtagttaaatgtgtcaatatttcagcaattttggtggtaaaattcaaatagggcatttaagtagaaaacaaatggaaaggaacaataataaaaacatccttttacccattcaacactagaaataggttattctttcattgttttaggattatattctcaaagacttagaagggagattaagaggaatttgatatagcaagcagtttttaaaacataattgcaaaagcagttgatgaatgtgcccacactgatgttttcaaatcacatctaatggagccataatgtaatatgagaaaataaccttatggggggtcagggggttgagcttctccaggaattttatgrgatatgctgggtcttaattacttcataatgactgacaatttttagagccttagaataaaggtttctttttttttyctaagttacattaaaaataaatatctgggtcaattactggcccatccatctgccaagtgaaaattgcaacaagacagaaaaacacggttgctcgtcatgggagtgaagcacccaracktgagcggagcggcttgggaagaggtcactgttgtttcctggggccgtgcctccgatctgccggggactcctcagcctgggagtyatttacaaaccaccgaggcccctcagctgcgggagaagctttgcttaataaatcctggcctctgargcgtggaattgtgaaktctctcagggaatgccgagggacaraactaatttcagcgtcttcgttctttgagaatgggaggtagcatcacgtctctgactggagcgttctgatgagggtgaccacctacccacaacgtgttttgaactcttttatttatagttgttgccttcctctttctttcttgacgtttcctcttcctcctgcttcccctctcttctcttttgcttcttctttccttgagttaaggataagttgttttttccactctggtttattgttataaggcttaaaagaagtcacagaaactggtgacttagcacataatacccatcttaggtttagaagagcaattgaaaacataatgttctcaatgggtattacaatagtagtttcttgccatgaccactttgtaatccacaactcattctacctactaatctctgtcacagtcccatgagatagagcagcatcagtgctgccccttacacaggtgccaggggtcagagacacttgcacagttagtcagtgtgccacctggctcattagaggttttgacaatctccgctggtgggattgaaaataaaacagggtttatgtttaagactgtctccttctaagccttcactcatttccagcaaatgcattttcacatgtctttcgtgagcattttaggataatttaaaaatattaagctatgctagagctgtgccaaagttttgaaaatggcttataaaaaataatctagagatctggaagcgtttagatggatgtgatctacagaaacacgggatttccttttctttagccggatggactttacaggtcatctgttccggtgatttgtttgaaacttttattaggcattacaatcttttcttcaggcaaaaattttgcacagaagtctattaaaacagtgtgcaagatgctgtgattgggagagggggcttcccccagcmcygtcctcagtattctggccctagagtgctgcctcaaaacctaccaggagcttagtctgtaaagcagttgaggactagggccaakttaactttgggctgaaacacgcagtaamatgagaaggccttccacacctcgctcatcactagcccactgcaaggctgcactttgcatgctcatggaaactcgcaggattattgaggaggctgtgcagagggaaggggccttttaattctctgcctccttagaggtgcaccctggcrggccaggagccccaggcagagatgtttctgtacaggtcccaggttttgcagcaaggtcccagagcatcccgttctcccagtgaaattccgttttcaatttcagcctgattccctgagtgaatttaatgtaaagctgtcccttccccctcggtcccggcaggtaaggagctgctggcgactgtcacaccagtgcccctgtcagcagacctgcttggctctggaaggatgggttgacaaaaagccataggtacctgaacttgtgtgtctttgtgcacaagaaaaaataatctgtcaccttgtttaaggcgtgttcggttgcgtttgatagtttgaaaatgctytggggaacaatcatctgtctggttttgagagtcaggtcgtaaaatggtgaaatcacatactgggggctggagtggggyggtgggcagtgtgggggcattgggargctgctggtttttttttttaaaaaacaagttttaattttttcatctaataaactgttttttgtttaaagagcagttttaggttcacagcaaaactgagcagaatgtaaagagaattcccatctatcccatccccccaccatgcccgctatcaacatccccacctgagtggtgcatttgttacaccccaggaaccacactgacacgtccycagcagccatagtttgcgttgagttcactcttgatgttctgacatgtayaatgagtgacctgtgtccaccatgaagttattgtacagagtaatttcgctgccctaaaattctctgtgctcagcctattcagcccatcctccccccccaacccctggcaactgctgatcttttcggagtcttcatgtgtttgcctttttcagaatgtcattgagttgaaatcacacagcctatgtccttttcggattggcttctttcagtaatatgcacttaagtttccaccctgtcttttcacggcttggtaggtcatttctttttagcactgaataatattccatggcctggatgtaccccagtttgcttgtctattcccctgccgaagaatatcttggatgtctccaagttttgacaattacggatgaagctgctgtcaacataggaaactggttttaaacgttcagtagagattaatgcaagaactctggagtgggggaggcctggaggcctgggttgaaatgaagttctaccagagaggatttctgctagctgatatcaggcaactgggggcttcatccatcaaaagcacttaacattgaaacttwcttttcttttctgagccacataagtaagaagaattcagacggcacctctgtctaggtgggtggctggtgaaaacttccaacagtacttttctctctccagagtgtaagagttcagatttgcatgtgtccattcttccctttctgtggggcagagatacatgtatttctctgtccccccgaggcgaagctatagtytctgaccccctgagtttcagcccagtgggagtgtttyttgtaagatttctcagtttgggaggaccttgggsttcatctcctgccctccttctcctgccccaaatggctaccaaggtgggtccagaagaaactctcagaggtctgtagtttgtttawcttctaggctttttayacatttctttccttcataatagctcagtgaaaaatgttaaaatattttaaaaatatattgtacccagcattttagttatatcaggcaggaagattgcttcagatgttgatgtgccctttcttggccagggcattgcaaggcagggttagtgctcgtaracaaacaaggattttttaggaggtgatgacaccatttccatcaggggtggccaggaatgggcacgtacagacagaagcattcaagtgacttgagaggatccttaggcagcctggaagtaagaggaagatgacaggccctctccgtctccacaaaaaacagtgtaattaaatgtggaatacccttacccccggaacatttgacctcagagaccttgggtctcaatgcattggacactgacagcccatgtattctactctgtgtgtgtccataaaccttcttcatttagtttatttattttttgagatggagtttcgctcttgttgcccaggctggagtgcaatggcgtgacctcggctcactgcaacccccgcctccctggctcaagcgattctcctgcctcagcctctggaggagctgggattataggcacgcaccaccgcgcccaagtagttttttgtatttttagtagagatggggtttcatcacgttggccaggctggtctcaaactcctgatcccaggtgattcatttactttcaattaacggcacctcaatggcctcccatttgactatagatgttaaataagtacagttgtctctccgtgtttggactaactgctcaaggctttgatgagcagcagagtctcatttagaaggagacttgccttggttcaagaattcactctcttacctaggatgtaattctatttttctgacaggacatgcttgatgggactgatgtctccagccaggtcagcgcagcagagaggtgaacaccagcatgtcttgttaagaagcaggagatgagttcatgagatttccacacacacacgttgatggcctttacatatgagcttggagatagaaaataatagctaataggttttagtcgtttccaagtgcatggcataattctaaattctttacatgtgaccacttcttctattttcataacagctgggggatagggagggggtaggctagtgtccctgtttttaaaatgaacaaatccaggcataggcagattatctgacttgtgtaaacccccataattagtaagcrgcagagccagaatggacgcagggacrgtctatgtctagagtcgttgttttgaactcctatgctgtgtctctctcaaagagaacaagaaagtacaagtcactacaatgaaaagaactccattgtcagtgagacatacaacacccttccaaagtgagaaagacaaaacacccagctaagactcactggctaattggaaagcaggacctgttattatgtaaaggctcctgtcctactaggtgagattttccttgagggtagggactaygtcttttcatctccctattcttgtgacacctggagcaggccttgctctcaataggctcctgatcaatgccgagttgtcacatcccctcatgcgttaaataaggccgtgtytgaggatcccactggaaagtcttggaagactctgggactcttgtaagccctgcacggtgcttcctgattatatgaggagttggagaatatcatgagaaaagtccaaagtctctcctaagttctgaactatagctcccttctcccacgtggcaactyttccctgatggtttaaagagcagaggtyttggcaaaaccaggctttccctcagattgttcagcagagggctgycagttatytaagacctttttaagaagcagatagacagcgaggtgcggaggctcatgcctgtaatcccagcactttgggaggccaaggcgggcagatcgcttgaggtcaggagtttgagaccagcctggccaacatgtcgaaaccctgtatgtactaaaaatacaaaaactagccgggtgtggtggtgcaagtctgtaatcccagctacttgggaggctgaggcaggagaatcacttgaacctggaaggtggaggttgccgtgagctgagatcttgccactgcactccagcttgggtgacagagactctgtcaaaggaaaaaaaaaaaaaagaggcagwtatatatgttcatctgttgcctttgaccttgtcaaatctattgaagttctcaatgccctgaaaacaaatggacttagatctatggccactctytggcaaaactgagggaattttaaactctagcatcttttgggctgtagcaaggtgacaaaattaagtttctggagtgccccagaggctamataaatgcaattttgtcatttctggagtgttctgtaaatatcgagcctataaaacagaatgcagttacaagaagagttaattcacaggttggtgaaaggaacactgctcataattagagtcaggtggtaaaggacatacttcctggtgaagcaggtgtgtagggacccgtgacattctcccatctggagttgtctcctcctctctccctgctcctgtggctgggggtgggattcctaagtcactktccctccctttccccattcccatttcttctgagtacttactaggtgcaaaacatttttctggacatttgggaaagctcagaaaataatatgttgatattcccctccaggaaggtagaccgtcctgggaaacccaggactagggtttcctggggaaacaagggaaascagtccaggcgtgtgggggagagattcagggtgctttccaccctctccyggacctcagcttcyctgcacctggctttgcttttgtaggctggggctgctgctcctctcggcttcttccatggcagtcggtgccacccagctcgctggtgttcctgactcgggctctgcccgcctcaccccytctgtaggctctccctggtgggtgttctgctgttcacagtcctgatttggcacaggccctctgaggacctcaacacagacgctccagagaagaggcctggacctgcgtcactgagaatgcatcagagggagcagttccgggaaagagaaaacaaccaagtcatttcggttggacgggacataaacactgcaagacaaaattgatgcacaataatgatatgatctgtcagaagaagtggcaaagaaagggaagaaatgagcggctgtgtgtgggcgagccattgatgcaggaggctctccttgccatttggtccagttgcagcagaataaaaaaagctccacttctggwtgagggatctcacatgacaagtatgcaagagctgtttaataccaccacgcctggccagtgacaggggcacggcatcctggttagtaatgaaagtggagtgagaaagctgcaggagcctgagatggatggaacagggaaggagcaaagtttccacagaggagacagaggaggaggaagcgggggacagaataccccacgactctagcggcacacgtacacaagcgaggcagcacgcagagttgacrggcacagatggactggtcacgtagcctggagttagggcaacagatggacaagtcattgcataaattggctacccagggaccacaaatgcctgctaggaaatccaaggacgtatcatgttgacccagtgacaacatacctgggcagaggtagacacaggtgcccctgatgtgaaagggaaatgaacagcagtttgcattggtgggggggaataaaaagcaaacgagattaataaggaaaggaaggaaattacattgtgtgcgtgtgtgtgtgcttaatgtcttttgtaagaggacttayctttaattcatctttgtaagacctgactttaattatgtcacttytgaatgttgtaatcgtatgactttcagagcagtgggagaggaaaataacatttggatatttgatagatattcaaaatatagctgaaataaattttctaaacactgaatctttagtctaagcacaaagtgaaaaacaataactttcatggaaatagttacttgtaaaatgttgttcagctttcagaatgaagtataaaatacaagatggagttgtcatttaaaaaccaaatagtactaaactaaaacaaaagtaattcttgctagatatatttaggttgctgtaatagtgtacccaaaaaaaaactatagtctgctgtgatggtattgattacctttttatttatggtaaaaatggatgaattgtcatgtctttaagttgctatttactcaatattttaatatacatttagtatatacatttgtgttaattcttttttaaagctttaaaaattaatcacgtaatctttgaaagtcactatgstagggaccggatacagtggtgaacaggataaaattgtttctgtcttcatgaagggtatataatctrttacttaaaaaaaaaaaaaaaaagactatarggccagatgtggtggctcatgtctgtgatcccagcattttgggaggctgagatgggaggattgcttgaggccaggagtttgagaccaggctgggcaagaaagcaaggcattcgtttctacaaaaccttttttttaaggactttaatttttagagcaattttaggtttaagcagaaaaagtaagcaggaagtacacagagttccratgttaccrcctgccacacatacatccattttcttggctattaacatcttagtgtagtacatttgttatcactgatgggccaatactgatatgttattattaactaaagtccatagtttacattcgggttcmcttttggtgktgtacatkctgtaggtttgacaattgtataatamgtgtatctaccattatagaatcatgcagaatagttcactccctaaagattccctgcgctccacctgttcatctctccaccctcacaaacccctggcaatcactagctttttacctttgatagttccgccttttccagaatgtcaagcagctgtgtgattcgagaatgggtggaagcatmcagtaaatagcatgtttagataggtctttttcacttagcartatgtatttaacggtactccatgtctttctggggcttgatggcttatgtctttttatcactgagtaataatccactgtttggaggtaccataggttattttatctmttcagctcttgaaataattgcagttgcttccagtttttggcaattatgaacaaagctgctattaacgtttgtgtacaggkttttatgtgcacataaktttttaactcatttggacaaatatttaaraatgtgattrctggatcatgtggttagcctatgtttagctttgccataaattgtcaaactgtcttccaaagtgactgtaccattttgctaccagcagtgagtgggagttcctgttactttacatccttgccagcatttggtgttgttggtgttttggattttggcaattctgataggtgtatagtggtatctccttattgttttaatttgcaattctttaatgacatatgatgtggagtatgttttcttatgcttatttgctatttttatatcttcttggtgaggtggctattcagatcttttgcccattttttatttgggttgttgttttcttattgatgagatttaagattgttttggcctttatcagatatgtgacttgagaatgtgtcctcccagtctgtggcttgccttttcattctctgaaaaatttctttccccaggcatccattatttgtgaactgtgtgggttgggcactggtggaccagagtagttctgggaaggtgaattgcaggcctccacagccaggctctgttagtcycaatattctcccagaaagtcaggttggactgttgcatgcccgaatgttggcactcacacctttcttgttcacttgcttctattgaccttgttactgggttgtacctatggttttggcctctcattttttgccgtgttggtcattttgtgcttctgatgactttagtagctgactctggccctggtcccttgacttcctgcaagttctgttacctgactgtggccatccaccctcccacatgggtgctgattgtcttgtttgtgtaccggcttggcctttgccagtgacagtttatcctgaccccagcccgaggcctaktgtctagaaaaattatcatattttcagtggttgattataaaaccagcattaggttgggtgtttctcagtttaatggctaaactcaaaatctttattgctgtcacccccaaacgaagttgccttgctgactttcccatttcttccctactggcctcaccattctcccagtaactcagactgtctgtcacagggccatctttgatttatccttcatcacctgtagacagtcagtagccttgttctcagagtgcttcagtgcytaccattcattctattaaaggacttgagttctaccatgataggaaaaaaractacatcattccaggaaggtatgtgtgcacgttcagacaataggttaatgccatatgcatttttctgaaaaccctgtatctccctatatggcagcctctaagagcctttgtggtaccaaaaccgggaatcattctttggctttgtttttaaacactgaaatccttcttcagtcttctctcttttttattcycactgccaccgatgtgaaactggccctggcttcatggctggccccttgaggcttcgtgctggactcaacaccttgggtctttctgaagggaagcctgctggggacaggaatagggaaagagctgagtaggacaataaggtggagagaaccagaaagcctttcaacccatctttagagtgagatcttcacagtgtgatttcgttattgtatttgaagtgaatgctagaatagctgatgcttttagaaatcaaatatagatacagaacacattacaaaactaagatttggtcattttaaaagctttgttatttgctttttcatcctctcctttcctcctattcactcaagtaaataatgatgtgaccacagttttctttacttaaaaatattttttttcacaggcttcagatctgtgtgtctacttgtcatgaaaagtatattttacyttaataagctaatgatttatttcrrcagaggaagcagagccytccaagtttatatgagattgattactccaragctttgactagagacctgttcttgtagaagcmagtctttttgtgaaagtcaggtgaattttagattgccttctcaaactctacctgtgtgtcataaagtcactgctatcattgttttcccctcatttccagtagsttatgagaactccagctattagcatgtagcatttaacctcctatactattaggtcgtttctttgattgcccagaacaatcttatcattggatgaaactattataaattatatgcacatagttttaaatgattgcaagatatatttgattctaggtcttttcagaagtttagcattgaatctttttcaaaattttctctttttgcaacatttccagctatatttcaacttgtttatcaraacgatggctgcctgggctaaaaccagtgctgccaggcaaagctgctcccagtggagcccaggtgggtgcaacagggagctggctgtcgggcagggctgagctgcttggagagcaggagtgagcaggtgggcatgatgagggagatgctgggggtcccaaggtgaggaaggaaaagagcaaatggccttctggtgcacgtggtcattaaggtgagatgactagtgagaagccttgagtcttgatgaatgggcgagggagacaatcctttatatcaagtcccaggaactaacttgagagcccaatgyggagggcactggaaagtcagttaaacagttagatagtcccacctgctgaggagatggaagcaagggccaaatcgcagggtgggggtcaggttggcctagagccctctrtgcgatgagaagcttgaaacccatctctcagtatgtgcagccactggagctggggtacagctggggtcttggtgagtcctaagtgactgttcagattaggtcacaacagactgaggtatttgtctttaattcaggaagcaagagcattgagagctcttgttcacattttacctgcagctgattcaatatcctgtctgactcttcaggtggtgttttaccaaattatgtcctggaagaggccagtccatattccagaagttagaccagatgctaatatgctctgcagctggctggaggagggctgggtcatataccacgtgatggggagagaagagggaggcagaggacacagtccagcctggagcagacatggagtcaaaggctgatcttggctcttggaagatcctggggggagattgaggtaggacaggtgtgtcacaggggcttctgggcagcattcagctctggggtgctcacaaagtgtggtggctgctggaaatagtgacctatgcctctcattagagtatttcagctgaaagggcctttggaatcttctcttctcccagggtaggaaatagaaactcaacaaaggtgatgactcagyattgtcaggcagctagcccatagcagggactagaccagaaccctggccttttcacttttcagagttcttttagaaacagttgaattgggctgtaagtgatctatattaaagtacatattttaaagtgaacagtatacgttttgacataggtagacactgtaaagccctcaccacagtcaagataatgagcagatccattccccaaaaaaagttacctcgcatgccttcatcattcctccccctgccttcctcaccccgcagscctggtgcccaggcaacctctgatctgcttcctgtcatgacaggtgtgtttgcattttgtagaatttttttctggaatcacacagatttctttttgtgcctggcttctttgattccacctgttttgagatgcatccatgttctcggatcagcagttcactcctttttcctgctgaatgatattctcttgtatggatgaagcatscttttccctgctgatgaacagtcaggttgttttcagtttggggctgttacaaataatgctgccatcaatattcatgtaccagtgtttgtgtgggtgtgtcatttcatttctcttacattaatacctagaaatggaatgaccaggacctgtggtaggtttatgtttaactttttaagaaatttccaaactgttttctggagtagttgtaccattttatattcccatcagcagtgtacgagggttccagtttcttcacttgctcattagcagttggtatggccagtctttttacttctagtgattgtaacaggtgtgtagccgtatcctactgtgtttttcacttgcattttcctgacgaccgaattatattattttstcatgaacttacttgccatgtgtatgtctttcataaattgtctgttcaaatctcttatgtatgctttttattgggttattttctcattgtaattttgacagctcytgatatattctggaaacaagtcctttatcagacataatgatttgcaaatattttatctgagtctgtggcttgtcttagcattctcttaacagtgttttttgaaaagyagaacttctaaatttygatgagatccagtctatcggtttttttttttatggatgaaacttttgtgtcatatctaagaactatttgtctaacacaaatattttctcttattttttcagaaattgtatagtttaagatgtacatttaagtctgcaatccattttgattaatttttatatatagtgcaagtcatttgacacgtgtgtaatatagcaaaaggcacatattggatctgtggattaaggtcactttacccaccgatggtgacagaagtcttctaccagtactgtcatattaaaatscaaaggtcaatcatacattatatatgtacatcactcaataaacccctaaagtacattgcccagttttcataatacatttaatgaaagaataataaggtcattaagggcaatcagtgttttgttatattcctgattatattcttgattatagtttgttgcatttctcgaacgaacatggatggagcaagaagtattcctcttccccctttaatgcgaaccaacatagtctcagactccagtttaaaaccttgtcaacagcagtgattgcacattgtttaccccacccgctcccggttgtagtaattatggtactttagatttcctggagaggacacagtgcttaatcatgtaattatgtctctggacggctatcccaaacaatgtggagcacgggctctgccgttcatgacaacagccaagagagaagtttgtttgggttcttattgtgcaracacagtgggaggggaggctgcagtggctggggagagcaactcgtggagggaaggagttgattttggaaagacaaaatggggttgtgtagggatatgtggctttttttcttcccccagttcttgtccttataattattccaggagtaggagtccttagcaccactgcattgactgtggtatatggctcagtctccacaccacagttatctagggctggggcaagtggatttgtcccggggaattactatgggtcctagtatttagccttccattgtgcttctagcccagaagtgtgcttgctttacaaaagtcaggagagagatacaggaaggagcaccggagttggagtctgacagtccccyacacctgctgggggatcaggaatgagtcacttagtctctcccgacaccaatttcgctatctgccagaaggggaaragtatccttctggtgtacccaagtggattcagtgagaggacatgctctccatgtacataatgggccaaaggtcatgcattttttcattttatgtggaaaaaatgacttgcacgtgttcgtttgggaggcaccatgaaaactggctttaccttctctagggaccttccctaaccccatcccagaccctgaggcggggttgccacattcattccccttgcatatttccctcattgcatgtcctgcgtcacartgatggctttgctcmctgctgtgagagcaggaatttcttcagggcsaagacctgtaatttttatttataactctagtgccatttcataagcatttgatgaataaacaactaaatgaatacatatgaagatgagcagagcagtcctggtgttgaaggaattcataacctggtggaggagatggacacgtgtgtgaataattgcagcacaccgttctagctataacaagcagtttattcacttttaaacaaaatgggaacgcttctttctcatctaataaaattgcttctgtgggcactccagacatttgggtagaaagtatgttgctgaaaaatgatttctaagaagagtagaggagatatggggagactacactcttttattccagccattactcatctgcaggctttcactttccatggcacctgaacttctactcccgaggttagggtggggcattcattacatattttcacagcaccatccttctcttttctgacactaatgatttgtttcccatctgcctcttctctccctatcatcyagactagcgcctagcacatagtaagacctcaataagttgctgctaattgactaactatacaatcaaacaagttcacaccataaagactttcttaaaaaataaccctggcttcagaaattttctgaagaggggaacgagttctttccccatcatgggatttgaatatgggcctgtggccccaggtttcttttgagcagggctacagtctgattttcttaatagaacacattacaccattaaatggatctccacacacctggaggagctaacctattgaagagaatgmtttcctgttatcctcctggaattcaggtacaatttaacttcttgccattaaaacacaamttgatagtggtaaccttttcccacctcttgggacgcttatttttagttttctggagaagatgcagattggaacacaatgactacagatagataaggcatagcccgcaaacccatttgcaggtgcgctgtgtttccttgcacagtcgtttgtctccaggtttgaatgcttctccaacgcctttattggcagttgaaaatagagttctagccaatgtcgatggattgttaccacaaaatgcaatttgctgctgcacgttgtgctcagataatgggcaasagtagaattcatccaaacaattgtgctccaacaattgtgttcaaagaaatgataccacagagtgagccattctcagttttctgaatcatttaagtggtttcattgtaactcatccctttgtcaactattcttcagtgggaaaataaaggcttaaaggaatttcttttcttcaagaaacagaacttatagcagaatcagaaatatgtcatgatatataggcctacttatggaagaaacaacccgtgttaccactgattactcgatcacttctgtagggctgaggcaacactgttaattctttgaattttctggctgcaccaggcataggtttgtgtgaacaacagggaagtgttacctacagagagccggcagggcagagtgtcaaatgcgtgggattcagaggcagaaaatttggacatcagctttgctgctaccgcttactctctcttttggttttttgttgttgttgttgtttgtttgtttttttgttttttgagacagagtctggctctctctcccagcctggagtgcagtgactcgatctcggctcactgcaagctccacctcccggggttcacgccattcccctgcctcagcctcctgagtagctgggaccacatgtgagtgccaccacgcccggctaatgttttgtatttttagtagagacggggtttcaccgtgttagccaggatggtctcgatctcctgacctcgtgatmtgcccacctcagcctcccaaagtgctgggattacaggsgtgagccatcgtgcctggcctgctaccgcttactctctctgtgaccgtggaaaaatgatctcatctaccttgaagggtttgttatgagtgtcaaagaagataatgtgcaatggatagcatggtttaaacagtgaaggaaaaaagttttgtagttgctatagaatgaatgttttcttgtatgaactgaaaaacttgagtcaagtttcacatgggagctttggtctttccttaatggaatattatcagaaaaatgtgttttatatatctgtctttgaaagttttacttatataccggattctgttacaaataataaaataaagttctgcttattggtagctatttctgtttcaagttaatgcacagagccacaaaatgccatacaaaagaaaggcaacatgatgtcctttggctgaaggcttcatttctattcgttttccatagaaattatgtgtgtctgcttttgaagaagcatactgaaaaaaaaaaaaaactatcctytactaggtgccttatttgtgtaatagaarttctaatccaagtttagtaatacaaagaaagagagttttgcagatggaagactgccagcttgacagcagtcatgcccaggatgctcataaggactgctagaggagggaggtcaccaggagccagcacagggccactgaaaccacgtcagagcagctggagttccacacgttggtgaggggtgaaggagaggggaattaagtgttatccaggtggatgtacctgaggttctgtgatttcataagcattcataacgagtattgacacaatattcatcattagctcattcacatcagaccctatgaagaatttaggaaagctgtgattccaagatcttcgggcttttyttcaaaagaagagagttatgaagccaggctgaaggcactgcagggtggaatttgtgctgcaggggagaggcacccggacacaatgggagccaggcgccttccccacagcttggctttgccacggcagaaatgctgagctgacaggaagctcattttgttcctggaagagggctttattttatttcaaaccctcagctgcctggtgcacatttttgttctggcartaaataactttaagctcatgtttgagttctttcttctttttttttttttaatattccatagaagaaaaataaaagtttttatatgaataatttttaagactcagtaagaagtaaacaaacagctttttaaaagtgggcaaaagatttgaaaagacatgtcactatatcaatgatacacagatggcatatagcatccagtttacaggaagcaaggggaatagagaaatgctttctgtgatacctaccatggggaagcaagcaggcaaacccagaatttgggatacactaaggacagctgatgtggcttcttaaatatatgagtgtgttttttaaaaaaggggagagggccttctcaattatgtaacatttagagtacatgaccaaatacsatgtgaggactaagggatggaaattgactaggggaaaaataactttaaaaaacttttttagggtgacaataatcaggggaacttgaatatggagtgggaattagatggtgctaatgagtaactgttaattttgttggatgagataatggtattgcagttatgtataaaaatagcatttagcaattatgtataaaaatattgagggctgaaatgatgtgagatttgctttaaaatactacaaaataaaggaaaaaggaagaaagaagaaagattgatggcgtacatgtgttgaaatgttagtaattgttgcatctggagagcgggtggataagtggggtttattttactatttttgcttttgtatatgtttgaaaactttcgtcgtaaaaattcttcataaccatctttctagaaattatgcagattgtaaaatataagtaaatagtgacataatttgaggcatggattactatrcatcttatatgcaagaaacacctgcccgtaaattcaattaaaaattgttttatctctacaaaaaattccgatttatcagacagtcaatttgcattacaaagggcactgtttcttttataaaatagtttgctgtaraattccattaaatgatttatgtaatttccatgggtagtctttttttttttttttggaratggacttttgctcttgttscccaggctggagtacagtggcgcgatcttggctcaccgcaacctcggcctcctgggttcaagtgactctcttgcctcascctctcaagtagctgggattataggcacgtgctaccacgcccagctaattttgtatttttagtaaagacagagttggtcaggctggtctcgaactctcaacctaaggtgacccgcacacctcgacctcccaaagtgctgggattacaggcgtgagccactgtgcccggccaggtactcttttttaaaaatcctccaatttagcccctttctttcttcagtctcttctattctccaaccatggatgctggctcccttcatgcctccaaaactttatgaaagcttatttcctctatctggagttattcccttcactttgttctttgtaaaagcttattatattagtcaatattctccaggaaaacagaagcaataggatgatctattgatgagttgatcgatctagaggttratgtattataaagaaytggctcaggattggctcatatgattatggaggctggtgagttccaagatctaagctggagaacaagagagctgatggcatagttccagtccaaatgccagcagcctttagatccaggaagagctgatgttttagttagagttcaaaggcaggaaaaaaatcagtgtctcasctcaatccttcaagccggaggagtcctttctactcaagtgttttgttctattcaggccttcaacttactgggtgaggaccatccacatcaaggagggctgtccgctttaccgggtctacggattcaaatgctaatgtcatccagaaacaccctcacagggacacccagaataatatttagccaaatgtcttggcacagtcaagttgacacataaaattaaccctcactcttactcgcgctttaagactaccctcaaacgaattctacaggaaagcgtccaaatgtcgatactatgtagatttaygtgtttattttttttattytacgctgtacatttcttgagggagagaaatttttgtcacattcatctttcaatcactagacactagcctaggacctggcataaaacaggtatcaagtaaatatctcttaagtgaatgaatgaatggatgaataacagcatctgtagcaaatttaggagaaactgcacaagttagaaggtatcatgttttaatattctaaatttaaatatgactagtaagagggtggsttttaagactggtataagcaatcatgaagagtgatggtttgtgaaaaagtagaccgtgtaacagcagcaaaataaagttagtaagataattctgaaaacaaaagctattcacatgcatatttgagactacagatatgataaaattagcattcagtaggaactatttgaattttgttttagtctaagttatagtgagttgttyaatctgttagcatttaagtcgattagcatttaaaataaaaatggtattyttccaamttattytaccctaccttaaaacctgctccccagaattccacattattttacctgctccttctagtagcatccatatcttgaaataacacatttatacctctattccttactttattcacttagacattagttacttctaccccctagtagttgtgcaactatggataagttatctgattttgctgtgctgtaatttcatcttttgtaaaatggggaaaatagttttctatcccacaatattcttttaggattaaatgaattactgttcataaagtacttggtatgtaataagagtcatgtaagttttataatcatgagaacagtgataattattaatatcacaattatcagtgatagaaagttagctttcttatgcaacctcccaccatctcacttcttctcattctttctctataattgtatcaaaacttttcagtaaatcaacactgtttaccttatgctatgtttatgttatgttattgtggctcwgtgaatgtgttctcaactgaagtcrataaatacactgttagggctacttttcaggcaacacaaactattccaattacttcaagcagaacctgagaaagagaattggaggcttacattatgatcctcgagccaacagtgggatttggcascttcctatctgcggatgaggcagcagctatcctaagaggtctacctgagcctaragagaggcagctgcgttataggaggtgaggataggagagagttgtaccctgcaggggcctggtgaaggaascctctgggaaccaggaagggagaagccccttcttcctcatgtgtccctccggcgccctctactgacaggggttagcatcaaggcatctggcaaasgacgcaatttacaaggcccagtgctrttatcacagagcagagaaagaagggtaggtttggagcagagttaataactggaactcctgttacattcaaacttctaacatgctagtgtagttaaattccaracagtatgtaaaaggcttgggtatgtayggtgggccaggggagcaggtccattgttttcaratatttgaaaaacagctgcctgagggagggaagacatcattagtatgtgtttctcagagggaccaagaccagggacagttatgggaaagcagatgttggcatcccatgagggttttggatgcttcactccaaatgtcaccattatcctgacactaagagtgatgaagctgaggctagggtgatcctcagtcattttgcggaagttcagctgggataggaggcagaagtgggtgattcccaaggtccattccaatctggagaagttatggacttttcagacatacctgtgttacctaaagtgagttgtgctgtatmtatagaggtcagcctacccatttatttatgtatccatgtgttatccatatgcctgattatccatctctctacccatccatccatgtatctactcatccgcccatttatccatgtatccactcatccatctgtacacccacccactcacccatccaccatcatccattcagccatctgtccatccactcatctaaccattcatccatccatccacccatccacccactcacctgttcaaccaagcaaccatccatytacccacccattcagccaaccaaccrtctatccgtccatccaaccattcgtctatcttcttttgagttgctttaaaactcagtaaagttatttcactcaattaaactaatattatttggaacagtgtttattggttggcttccaaggactatatatgatattaatattggaattaatcaaggacatgacgtgcaartgcattattttcatcagtttagatatgagaataattcttatttgctgcctttcatattccaggtgtccttttttctgaaaatttctcataatgtgccaaagaagataagagtaatgtgagcaaagttactgaataaaaccacatatgaccaaagcattgaaatgagaaaacagaacatgttttcatccccgtgattgcaagataattccatacgatcaagtttgaagtttcagaaatcttaaggaacagctctctaagcagaagagcttaaatgattatctgggtcttctatgactccccgtgttttatttccttagtccaagccttgtgtaagggttcacagtatgattttactattttgtagatgcatcttcttttctgacacatgggaattttaaagaattggagttgtgaaacagaaatgaaagcacaagaagcatttcctctgtacagcctctttattgttcattggtgaaataagtagcaaagagtccaattctctttctcaggttctgcttgaagtaattggaacagtcatagtaaaaagcaagagatggaactaggattcacacctgagtctgtgcccttcaccactatgcactggcatctcccaatggattaggaaatgtgtaagtacaaggagatgccatgagaaacttgcagtcggtcgactctgtcacttataagctgtgtgacacaaaacaggaaacctcagtacaatccatgaaaaaagcagggcccagagattaacatggattcctcaacatcacacagacaaagagttgcacatctagggttggaaatgacscctcttgacccacaatctggaactcgtttgtttttaacctacttttttagttttgttccataraaaatcattaattgctcatgaaaagtgaaatygcactgctraaaacctgtcctctggtactgggggtttaagttccttctgttgctccaacactggctggtgtttacacactggtgcctgggcaggcctctcgctccgtgtstgggcttcctggtggtcactgcagcggtcgttactgtgggggaaacaggcgacacatgtagggtgacctccgtggtggtggctactctgtttctttataracaagttacctttctctaatcagcagtccacagcagtggctccctgactgtgcctcctggagcagctgtttggggctcagtggccgagcacatggtcgcagtaagtgcacgccacccagcgagagttggttaatcatatataatccacccaacagtgggctgccttgtaattgttacagggccctttcagtttcttgcaatttcctttgtctcagcagttttggttgcatcctgaaaactgtcaggctttcttgtttctgtaaggacctgacaattccggcctcacaatgcagcttaaattggaccagctgctgcctcaatggagcagtctgcccatctccaaggcattaagcccaaaattatttcgaaaattgaagcctttgacttgctctggattaatgtgattaagcagggcttgctttaatttgtagccatctcgtcctttattaataacatctcatcatttggagcagcatgcgtgtctgcaagacaacagaaagttaggttgattgcagtttctaagagaagtctttaatgtttcaggagcaactgatatgcagcttcaattgtgggggcagatttagatctgcttgttattcttaattttttatgtaaaactaataagcaaatgaatcctccttccctcctccactttgaccccacctccccgaggtctacatatgatttatcgttccctttaagtaataaagaaaggatctttttttcatctgaattgtgtcagctggtgaaatctggaagaaatatccttcagggttaagaaaggtagaattaaatggatttgattttttttctctgtgtaattgaatgtgtattaccattaagataattataaataatctgttagcttttctaaataagaaagtatatacctcattacttgagacctagattttaataataacagcagtggattatagtggaaggaattaggacgtgttttaaaaatgtccttaataatttttaagctcaatgacattattcttataaaatttatcctggcaaacttaagacagtaataatctaagtctcgtatctttttctccttacaataatttagctaatgaaagtacatgtccaggtatttttctgaggttaaatctgatcttccttctttattatcagagccaaagaacacagctctaggagtcagtaaccctggagctactccactttctctcaccaaagcgctgtgttttcttgggaaggtcactcaccctgtttatgcctctttccatatttctaagawtaggaaattgaggaggaaactttctaaaatcccttctagttctattctgtatttccaacttctgatgtttcctacccccatttacaaagtgtgtttcactgggtctggttccaatacagtcgtcttgctttttctctgtatggagtaggtagtataagtggcaaaatgtactgatatttgggtcaaatcagattatttytggaagtcaaagagcctcaaataacccaatgtcattgtatatacttaaytgcttatcatctttyttaaaaataaatggctatctaatttayggttctttggctacttattagcttataattttttgtattcagatctctttataataagtatgggaggtaatgcatatgctcattagcttgatttagcccttcaacaatgtatacatatttgaaaagttcatgttgtatatcataaatatatacaatttttatttatcaataaaaacaaattaagaaaaacaactctttacataggcaataaaaatacctatgaaggaattgtargagtaktacctgttattacagcaggggcaakttgtaaacctctttccattttttcccttcattttgcccaatattttgatatctcctgtaatgtcratgctcsctgtcttgttaaacactttattatcacttgaggcatttatttatttattctacagatatcattttcagaaatgatttgtggtggttcttctggactgagaaragcctgggtttcacagctgggtacagcaggggtggggttgccacttggtctgagtaraaggaattctggagtaccttcgggtctctgtctgggccatctgctgcataaatycctttacaacacaagaggcagcatacttgctcttgacctggttctgtcactgtggaattggaccacctgccatcacaagtagatccagcaaatgtaccgtggctcgcacatgcacaggttgacttcttgttcatgtaacaaccaaaaacacacttyggtgggtggctttcctcacgtggcaattcagggggycatacagctttccttctgtggctctgctatctcccataaccccattgaaatctacatccagcccatcagayggacggagagcacatggagtgggcacacctatggcctgtaggccttggctcagctatggtgcacctcacgtctgctcacattcttgggagacctcacctgcatggccacactaactgtgagagaacctaggaaatggaatttttagagatgagagatagagctctacctccctgtggtgacatggtaactcctagaagaaagggmagaaatggttagtatttgtgagtacagccctttactgaacttcagaagttttagacagtcttttaaagttgatttcaaaggacctggrcatctctacattcccgtcagactaatttgacttgtggcttrgtctttcaaagatttttggagctgtaagtcttactggcaccatgtaggtggtagtcaggacagttctgctagtctcattgagcatgcctagtaactggaatagatttttgccttacagtagaattgaaaaaaaattgccccgtgatggttatttttacaaaggtcatttaggtcattgattatctgggcatcatgcagttgttttcttgttgtttcctaccataatttttaccaggctctgctactaaatggctgcatgatcttgcgtatctgctggagcctctgtctcttcattagtaaaagtagggaatgtaattcttaccttgttsggtggggtgatrattaaagcgtgcattgcgtgtcttccatgtagccactcagcataactttgttaaggaaattaattaatacagagtagctgactctccagacatatgtaatgggtgaaaatagggtggagtttggacattgattttagaaacacattctcagagttttaagaaatcagcaatatcaaagctaattccctttgacaactcaactttgtctaagagataacaactccctttggcatctcatctttggggcagcgttttctgatcctacaagtttgagtttgatygtcatcctcccaccctaccccccacacgccttctctgtatgactggtttacgtctctgactctcccgttatatcaaaaacttttttccccatatgcatccccacccctmgcaaggttgaaatgcacaaaattgccatttaagtagttamaaaatggttgagtattaacagtttcatttggttgaagctaayacctagaaggcacaagatattttgtgagctwttgagcaacgtctgacacctgaatgtagcgtccatgctgctcttcttttgagtcctgtgctatgtttagcatccattatgccatcactgacttcatataggccatgaatatgtatatatgtatgatgtaatcctgagtgtgcttctggagctatttcaaatatctatgactcagtgtgcattaaatgtggcaaatctgtttcttggatattctgttgaatttacctctaaagacaactaggcctgatattttccttttggaaaacatgtttttaacttacaatccattttctaaaatagttattaaagatagtgcagccttgctttttcttctttctgggcsaactttgggaagttatatttttctaagaaatttttgacgtgaagtttttgcagtgtttttcttatctttttaggctttactgaatctgtagttatggcccccttttatttgtgatataatttatttgtgctttctttttttttctgatcaatttttttgccttcgtgaacctttctataaagtgttctatgcttcattaacttttgcccccctcttttagttccatccttcaaataccttcgtatagttgtcattctctttttaacttaytttgttgatattttttactttttgctcctttctaataattaattcaattcaagttataratttctattgctgtatcccaatcgttttgatagtagcagctccattataattcattttaaagattttaacattgtaattgtgatttttcctgtttgagttatttaaagttacctttttgatagtgatgtctaatagtcttaagctagacaacttaaaaaatatttgtaaccctcatacactgctgstatgaagggaaaatcgtgtagtcactttggaaaccagtgtggcagttccttaaaaggttaaacatagggttagtctatgactcagcaattctactcttaggtatatacccaagagtcatgacaacctgtgtccatacaaaagcctgtacacaaatatttatagcagcattatttgactattcataatagccataaagtggaaacaacccaaacgcgcatcagcgtgtgaatgggtaaataaaataaggtatacacgtacaacagcgtgaactactaatgcacacaacaacatggtcgatattgaaaatgtgctacatgaaagaatccactcgcaaaaaaccatagagtgtatgattctatttatttgaaaygtccagaatagggaaagctgtagagacagaaataasacacattagtcattagcttggacgggggagatggtgggtttgggaatgakagctaaagtgtatggagtctstttttggagtgataaaaatgttttaaaattgattgtggtaatgattacccaactgtgaatatactaaaaaccactgagttatatttaaataggtggattgtatagtatgtgaatttcatctcagtaaagctggttgttaccagagaaaaaagcattttctaccaaaatcaccaataaattatgatagctctaaactacttactttaaatttgtttgtgctgattcttactctctctcacctctccctctctgccattctcctggacttytccccatcgttggaaatgtcgaataacaaagtttggattatttatcaaaaaggattgatttaatgaaaatgaatggagaaggctgacatgaacataattttccagttcccaccctcataggtaatcatctataaacccactgggatggcacagccttgacaatgcggcggtgcttactaacaagcacacccgacctagacagtatgattttgcaaaagcagaatcctgaaacaatgcaagtgcagtgaacataggagccagtacaccgcatataacacaacttagaaaaatgctatcgataagaaatggtctttcagagacgatttccggcatgtgctacaggggaaaatggtatcaaatytacacaatgaccgggttctatggagtggctcctctgtggggaattttactttattytytttgccagaaaccttgaccccaccctgtctgtgaagtagcagcctgctttgtaaaggggcgctgatcaagacgaaggctattatcgagctgggatccaaacatctgaagcttatcaccaagcacaatagtgacggcttcttagccacgtttctaattatatttttttccctgctttttagataaagggacaaagaaatacggggcttactttgcaggtttttcaggctgctytgaagtgttctttcgaaggtggagggttatagttttgtgtaatagcagtgctgggaacagggtgggttyttccagactctccccccacgtacaatagtgtgtggatggcagagatgcattgggagctgaaataattcatttgtcctttctaatgaatagtaataatttataattygtactaatcaaaaacctttcatccacaaaagccarcaagttttataaacattctcctctcaccagcctctacagtaagtgcctgacaaaggtaggatcgtccataatttgcagaagggccaagatagagaacacagtgcagaaatcattactaatttatctgcagcttggaatttatatttggaaagtcactttgaacttattttcatcaagctrttttgatygcccagaaatataatttatactgacctccataatggatatctgccaagatgaaagctacaaaagtcattgatccagatgttttctgttatctgcaaacctagcaaagccatatttgccagcatagtcgacattgtggggacaggtgtccattctgtgtccccttggtgtccagccctattatctctgtagcctccggtgacagagcagccatagtggcactgtgsttgatgcaaagataccattaccttctcgtctgttctytgatcagtgagtggtggcgatatgagctgagcataaagcaggaagagtggggatgcccttgtattcagtatacctccagaccttatcactaccaagtgtccaacacagggstgstaagtaatcttgaaaatataccttccactyttatcagtgcaccttcttracaccaaatctgtattcttgatcctggaattcagaattctccatcaaaaacattgaaaagcaggttacttcatcagctctcctctatatactgtgttgaggaaaagatttgcatgtaattagcctccttccacctccctccagaaaaaccccccaaatttagagaccagtcctaacccttagaaaatgcatagtgttgcagactgcttttgaagattaaagagatgaaaattccattcttaacttcaagagsttccttaaacctggtccaaaagactttcctaaaagcccagccagttcagatgataggtgcagacacatcatattgcatatattcacattacacacacacacacacacacacacacacacacactctcacccttctctttgctggggaaaggtttgttgcagaagttrccattccaatacaccatgcaagatgcattcagacgttctcttagatttcagtatcacacggtggatcctgcattktgtcatataaaaattrcacatcatttttagctgccttcagaaccctcttcatatttattaggagtattgtgctcctatccagcarctaaagctgcttcgtgttgtccagttagggtgaactatagaagaaatgtcctatctactgcttttcttttttaaaaaaatttttatttccttaagttttgggggaacaggtggtatttggttacatgagtgcattctttagtggtgatttgtgagattttgttgcacccatcacccaagcactatacactgaaccgaatttgtagtattttatctctcacccccttcctcctctttccccctgagtccccaaaagtccattttgtcattcttatgcctttgcatcctcatagcttagctcccacttatgagtgagaacatacaatgtttttttttccattcctgagttactccacttagaataagtctccagtctcatccaggttgctgtgaatgccattaattgattccttttttggttgagtagtattctatctcatatatatatatatatatatatatatatatatatatatatacacacacacacacacacacacacatatatattacagtttctttatctactcattgattgatgggcatttggattggttctgcattttacaattgtgaattgtgctgctataaacatgcatgtgcaagtatcttttttgtattatgacttcttttcctcttggtagatagccagtagtgggattgctggatcaaatggtagttctacttttagtttgttaaggaatctccacactgttttccatagtggttgtactagtttacattcctgccactgcttttctgcttttcttgagggataattggttaattaggaaaactgactgaagagagaatgaatcattattattattacttttttttgagacagagttttactcttgttcccgggatggagtgcaatggcacaatctcggctcactgcaacctccacctcccaggttcaagcaattctcctgcctcagcctcccgaatagctgggactataggcgcccgccaccacacccggctaatttttttttggatttttactagatactggggtttcaccatgttagccaggctggactcaaactcctcacctcaagtgaaccacttgccttggcctcccaaagtgctgggattacaggcatgagccaacatgcccggcacggaatgaatcattttttgaaaaggtttacagaaacctttaaaaaagaaaacttaaataaatgtacgttattgtgccaaacattggattcatgtccattatctctcctttgacctagagtcccctccctacttggagtggctcctcatcttccttctttagcacagtgtggaggtaggagtgaarattctggagctacattatggaggtstgggttctgactcygcccctcagtggtggtgtgatggtggctgtgccatgtaacctctctgtgcctaactgtcctcatctgtaaaatggatataatgaaaatagctcttattggcttgatgggagaattagttgagttagtatatgtaaaccacttatagttgtgcctcatccagaacaagcactgtttgccactattattatcaaatgatctctagttttgcatcttcaaaatctagtgagaatttaaagacattcgtgtagcaacttgaacaaagaatttatytagattttcatgacttcctccccaatctttttttctttaaaaaaaaaaaaaagctggaaaaatacacataacataaaaattactaacagccatttttaagtgtrttgttcagcagtatggagcccattcccttcgtcgtgcagtcatcaccaccatccactcctcgagctctcttcatcttgtaaaaccaaaactctgtgaccattcaccaccaattctgcatccgccttctccgagcccttgacagccacccttcccaatcttacggagtagtcttgcctgcatttaatttgacagtatttttaacaactttcttttattaagctttctaaagcatttcccttattttttattttttggttttgttattttcatttgacacctaaaaatggtacctatttatggagtacagggtgatgtttccatacatgtatacaatgtgtaatgatcaaatcagagtaattagcatatccatcacctcagacgtttatcatttctttgtgttgggaaccttcaaaagctgctcttctagctgtctgaaaatatacaataaatgattgttaattatagtcagtctgtagggttctggaatactggaacttattccccccatctcaatgtattttgtacctgttaaccagtctctccctatatccccttccccccrctccttccccgcctctggtaaccactctactctctamttctataagatcaactttttcagcttccacgtatgagagagaacatgcggtatttatcttcctatgcctggattgtttcagttcataaaatgtcatctaagcttatctatgttatcttaaatgacagttttgttctttttttaaaacaaaattaaatattaattttaatagaaacaaagctgtatttcttcttctgcttttatttctgtatgtgtgacatttaattaaaatttctaattaraarataaagtgcaattggcctaaaccagtttgggaacagtcacaactaattgggtaagggtacccctcagctggagggagcttcttggtgcaggcatgtcagagggagctrtggggttctgatactgtgggcactgggcaccgtgtctgccagcaggaatggtgtggcttatttaatctaagccatcctgtccattctaggatcttcttcctgtgttayggtgctcgtcattttcaacatctgaagcactcttacctctacctgtgtgtgtctaagtagttcccgtttttcaacattgatatggtttgactgtatccccacccagatctcatcttgaattcccatgtgttgtgggagggacctggtgggaggtaattgaatcatgggggcaggtctttctggtgctgttctcatgatagtgaataagtctcacgagatctcatggttataaaaaggggagtttccctgcacaagcactcctctctttgcctgctgccgccrccatccatgtaagatgtgacttgctcctccttgcctcccactgtgattttgaggcttccccagccatgtggaactgtaagtaggataaacctctttattttgtaagttgcccagtcttgggtatgtctttaccagcagcatgaaaacagactaatacaaacatccagttagatatactgtctccattaaaccaragcacttgtctgtgcccctcccatggcacctaacactttctatcctgtgttttcagtgtttgggtgagttctccaagagcaggctcagtgtatcacatgtctttggatgtctcctatcattggcttcaagccaagattgaaggctcacatgtattgaattcctggcctgtccggctgggacagagagaatgagtagagaaactaagtatcagcacactttatagttaaagcctgtgtgtacgcacatgtgtgtgcacacacgtgtataatgtaatctttatagcgtacctttttggcgtttttattataactgctgtgctgacaaggaagtcgagactcagagaggttaagcgattcgtccaaatcaaatattctagctacagtgccaatgcccttggcacagtttcccagcacttcattgttgaaacgtttggtgtgttcctgagggcatgtcttggggctcctacattaattactgaccatcatcagagatctactagtcaaggctaaaagattcccaatatcaatcaaattacagccgagtctgcatctatacgaagtcattggtagcaataatttagtagttaccattagctccaatgtttatggggagaaagcatgaaattatggaatcaaacctactgggccctgaatgacctgaattaagcaaataatttggcctcatkgaggcttagttttctcatctttgaaatgtaaaacagacatcataatacatggagttcccatgaagatttaatacgcaattaatgcatatgaaagcatttcatgagctacaaaagtgttacaccaatctaaggtatcatcatcatcccacgcttacagagtaaccaggaatctcaagtcaggaaaagtccagtgcagagttcggaataacacagaacaagctacctaagtccagaagtggggcctctggtgtttgttactgagagaacccctttgagacacacaccgttctcatgcgttggacttactattagtgtcttggtctggtgaatttttgctcagggctttgtttccctcataagttaaaataacgacaggcaaaggyacgtagtctagctgaatgctctccatttttgtttcagacctggatatcctacaggtgtgaagttgccaagaataagggagacccaggggtcaaggggaccatggtagagcattagagtcaccctttcctctgtaaagttgtccctgcgttctcaagctgtgtcactgaaatctgagaatacccttctccagcagtaattgcttcatcctggagttgccatttgcttgtttctctgccctcctagactgtgagctctttgaggtcgggacctgtcttaatcctgttttggctgcatcccagagagtgctcagagctcatgctagggtttagtaaatacttagtgaatgaatccctcctgtggttgtgatgttggattacgagccccatacaaaagtgaaaatgaggttggaattatagttggtttggtcaccattttgattgtactgatatttgattgaatcagattactgtttttcaggctttaaaaaaattatagtcgccctaagcggcctttttagacatttctctcttgtctcccccagtccccttccattaaatttaataccacagatatactatataccactagttactgtggccctttagaagccgtagccattttcatatgtaagatatttttgtcccccaagaacygatttttgcccccttgaagtgacaccacccttattgagaaatcataatttatagaatcaggtggtttggtgctgtgcagatattctaaagagttcctatttgatatgtacatagtcgattataaagttcttaagcctcagttgcttgttgtgttggcatgcttttaagataaagctgttggactgattttttttggggggctgtggtgtaaaataactgatgcttttggcactgtctaggaggcaaggccaagactttcctcagaccagcaacagtgtttcagtgtgggtctgagttataaacaaatctgaagttcttagttccattttttaaaaaaaatttagactaaaaatgtacttacatttattattaatagtttagttagagccatgcttcctgagcaatcctgccacatccttcctatgtgagctatttgtaaataatgtactatccaagttgggagaatatgttaccaccatatacacttaaaaagcaactataatgtggctaatgtgcagaatgaataggcaattttcattgtctttggatgacgtgaagtagctctctggcaaaaatggtgcaagcagccacggtgtttgaagtggtgagcttcaataggagtgccatttctttttttttttccttttttctttttgaattattttactttatcttatttttttgaaatggagtctcgctctgtcgccaggctggagtgcagtggcatgatctcggctcactgcaacctctgcctcccaggttcaagccattctcctgcctcagtctctggagtagctgggtttacaggtgcccgccaccatgcctggctaatttttgtatttttagtagagacggatttcaccatgttggccaggatggtcttgatatcttgacctcataatctgtccacctcggtctcccagagtgctgggattacaggcatgagccactgcacccagccttctttttaatttttgtgtgtacatagtaggtacatttatggggtatacgagatgataggcatattatcttgtgtatcaagatagtgggtatatatatttatggggtacatgagctgttttgatacaggatgcagtgtgtaggaatcacatcatggagaatggggtctgcatcccctcgagcatttatcctttgtgttacagacaatccatttattttcttttagttattttgaaatgtacagttaaattattgactatagtcaccctgttgtgctatcaaatggtatggagtgccttttctcatccatcgcatggagagtttagaacagtttttgaagaatatgaaaacatattggacttgatttcaaagaccccttctattatcatgctcgtagggcctctctagttgtcttttaactctgaggtggaacacagacacttttaggaaaacgtacgcttgacaacttacccagagaaacctrtctttgcttggagagccgtccatgttgttctgtttgtactaacatagatcctaaacatttgaagtcttctggcatctcattgtgaagttctgygatgccatggttgatcattattagtatatggagttataagatttgattaccactggtaagttcccaaagtgctttgtgctttcccctttatgtctgttattgctcttaaccatcttctaagattgataggacagatattagtatgcccattttatagatgagcagcctgtggctaagagaagttaagtggcctctctagcagattatgccctcaaatgtagaaaaactcaatgtggttcttcagactccaaagtcagtgccatttacttgcccgtagtaaatgccttcagccttcttaaaagccatcgtggaggagtgagcaggtcccaagaagcactgcctggactgtgagtaggaggaggcagaagttgacttaataaaggcatggatttctagcaattaggacatcccaatagtggcatgaactactttgagaattagagagtgccctgtcttgaaatggtcatctggaggttggagtgggctaaactatatagtatgccatttggctagatgacctttcaggtcccttacaattctgagactttgttgaaaaaaaaaaatgttctgtccatttcctcctttgtggtttagccacatacatcagatgcccaagttcgtggttcctttcccagctttgcatcagaagcacccatggggctttgtgagaatgcatatgccaggcctgcccccagctctcctgtatcggaattccattggtggggtggagggggaggcgtgagagtatgtttcagagttccacaaggatttctaagttgttaaattgtgaaccactctycttgtgtagcccactgacaacaaggcacacacagacctctttttaaacttggtggtataattcagtagcatcaaggaatcatagtttctcagtgtgcaatacccttgttaatattaaaaggccatttaataaactgcattggttctcttggctgcagggataccatggtccctgcttgacagattggttttgcccatatcttatcatccctgcctgtttcgcagcagagtgggagtttggtgccagtctagaaaatgggcasaggtccttttgtacccttcttattctggaaaatccagctcaaagggttagcattgggtgcgaaggccagcctctgaaatcagcaggttggatacagaaactagggagtggctcactgctatcctagttacctacttctacgtactggttttctttgtaccagttagaaacctccagtgcacaaagaattaacggttgccattgactgctttcttgaagacttttcttgatccagtactgagctgtgtttatggcactcctctgagagcataatctctgaaggatatgtctgtataaaatatacagcagaggatcataaattctccatcgtgtctccccatggcgggccaacaacaacaaaaaattcacaattgctccaccagtattttttttctacttttcaatcaataggatgctttttaaagcttatgtttctcgtcggacactttaagtgacgaatgagacaaaagaaaaaaaaagccaagataaaatgacagtatagacactcctcaaatcctataatgaactccacagggcatccaattttgatgtattaggattttttttttataatgagtacattgttggaaatcacattttctatccgcaggagctggagatgaaaccgagctgacatcttacctctttgtagttaattagcaagagaaaagtagtgttttgaatctcgtgtgggaaaaggggaggtattattcacccaccctcgcccctttctcccttcaaacacctggatcattctgtgtgctctttgatttggtttaacggtttggataagtctggctggcagggaaaggatgagggaggttgaagaatggttattatttaatgaaaaaaaattactgtgtctccctctcccctccatcttgcttataggataaataaactaagtcaagtctttttattttaaagatcagtttcttacctggactcggactctaggcagttcccgtggcacaagggttgtttgttgtcaccatcgttacattagtcaccgtggaatcctcagtgctcagcaccgtgcatggagcttagcaggcatttgatcagtatttattaatgaataaataaaatggtgctggcccatacagtraagtattctagtcgcattagctgtgtctaatacctttctctgcatagtagccacatccactttaggatttgtagtgaggtttccgtagaattcagtggttagggacagagggttggagtccagtgtgcatgtgggattccatctagggactggtcattggcaggtgaatggagctggggtccatacagatgccccgtccggatgaaggataagtgagtggtgggcagatgcagcacgagggctcctccggcccrtacgtctttattaacatcacatcacatgcccagtcctggggcctacagaggagagccactgtcactaagcacatacttgtaagcactgagcactcacaggttgcaccgcatgggactgatcccaagtagaataagatggggcggcagggccgggtgtggaaggaaacaccactttttgcatctcctctccctgcccttgctgaactctgcctgctccctccaccgtcggtcctcttcacagccacccgctgggggaccccaggggaggtgactcagtggaggagccctgctctgacaaagtcagtcccacagaatcgcastggccgggctctctccctgcacagcgcctcttcctggggtccccagctcagagaagcctcctggaggaagcaagactcgaggggaccctgaaagcaggcagggcttggactgtgggtagcctgggacactgtggactggggacagcaggacctggggtgaccctgagggcagagagggcttggtgggcgagccctacaggctggggacagcaggagccggtggtgggtgtgaggggttagcctggcctggggagggtgggggaaaccaggttgctgtcataccagtgatggagggccctagtggccagccaagggctcctgtaggccccagggaaggggacagagatgacaggtgtggagaagcagcaaggaggagggcttgttggcctctggctaggcttggggttgtctccgtccctcgtgagctctgagccttggctttcctctcagtaaaatggacataggagcatttaccccaatggccaagggtggctgcaatgctgacatgagtctatggatctagaggctttgcagggcacaggacactgtctgaaggcagagtctgaggttcctgtccctataggattgcatcaggggtgcgccatccctatgatgggccagctaagcagctcccatggtggccaggtgcgtgggtaagctcatgagccactttgtggctttgcaacaacaaagatgagctactgcttccatttggattcctgctcttgctttggatgccctccccgccccacaagtcatctgccgtgaccgcttcctccgtgtgcgtctgacgtcccggtatgcgtgtgactgctcaggcgtgactgcttagcgcccaccaatgctctcctccagacatctgcatctctgagcatcttagcctgggcctcagtccagcctcccccacttgatatttgaatgattttggacgagcactgtgttttggatagcactgtggtgactgttactagggaatcatctggacagcgaagaaaggtccgacgtgtctctggttccccaacctcttcctcagctgtactgcaggtctccgtaaagggttcctttcctgtttccttcctcccctcctgcttcctccccttccctctcctccctccctttccttccccttctcttcctccttgccctctggggctcctgtgagtctcctgatgactggggcagcaggtgctgggacacaggagagcacaggctgagagctggctactcagggatctgtggcgctctagaccagtggttcacaacctttccttaacactaagaatcatcttgggccaggcatggtggctcatgcctgtaatctcaacacttcgaaaggccgaggtgggaggatcacctgaggttaggagtttgagaccagcctggccaacatggcgaaaccccatctctactaaaaatacaaaaaccacccaggcatggtggcatgcacctataatctcagctacttaggaggctgaggcagaattgcttgaacctgggaggtggaggttccagtgaaccgagattgcaccactgcactccagcctgggcaagagagtgagactcctctatctctaaataaataaataaataatttttaaaaagaatcattttgggaaacttttagacatagattccctgaccaaggacattgggaaccaagtcacagtagcagtcaaatgatactagcaacgctgccatgaagaaaggtgataccggctgagttattctgcctgtgctgggccagactgctcaaatgcctcccgtggagttttgagctaatcatcaggacagtcccctgaggtgggtgctatcagtgtccccattttgcagttaaggaagttaaagcccatagaggaagaagctttgccaaagtcacacagctgctaagtgaccagggtggcaactcgggcactctggctcccaaaccgagttcttgagctctcctctccatgctcctttggtctgggtggtgcccagccatctgtctagataggtatcctgctgactgcaatgtggcagtctatggctggtagggacgtgggggaacagtgtgaccgacctccttgcacagggctgtcattgcactgcgggctacagcagagcccagttcacactggagggscacccactcagctgggctgttttctgaggaaccagttgtttgtcctcccctaaccttcyccacagcagcacagagtccaggaaccctgagcaccgggaccagggccggcttgggaggggtgggggcgggggctttgtgcacaggtcttgcctgtgggcctcatttctgtgtctctggtatgagaaaaacctggattgaatagaaagaccttccctgaaactgggaggttgctgagagaccaaagaatgacttggacaagtccagcttggcgatagatgagtttattaggacttacatagcaggcactcctgggcggcaggacagatctagagatcyctgctgctcccgtctctaaactgcctttaagctaatttcctggctctttgcctactgtgtttgggcaatgagactgcttgtcttgctacgttctcagataagttccggggcattgggttctcagggacgcctgctcctcagctgggcaccatggcctcagctccacctgacttcaaggctcaagcagtggacacacacctttaaggaacctgctgggggaccgtcgcactgcgctgcctctctcatttcccatttcttgtccccacgaagcctctccggaaggcacaggctctgctctcgttcttactccttccttctcacacagggacctggggatctacacagaccacgtgggcctagactgctggcccagtgacccttggaggcccccttggtccttctagatgagccccacctgggaccccacgcaggccgagctgctcttggttctgacggctctgctcggcctccctcccaaatctcgtctacataagacctgcttccctgctggcgaagcaccaccatttctatggagaacttggggtgtcattctcaactccagtctgagttgccatcatgttccatgatgctggcagcgtgtcccagcctgtggtcacttggcaccccctggagaggtggacttgtactctggatctgcagcccaggcagcagtgggagcctytcctccagctcagccccggtgcctctgccctctcccaggtctcatggactctggtggacaaaggttcttgtcagaggaagtcgttgacagggtgcsatgggaaacggcctctccagggaggcaagattccagcctcagctcttgctcctgtagcccctctttcggaggtgtctttctgcctggattaaacacttgctcattaaacctggcttaataagaaactagaaaagaaaaagaattagaaaaattctgattctagactgggtaatcgctttgagaaatgcgatttttcccttttgccacttcatcaaaagagtgrgaatctgggcctttctagggtgtggatgaaggctgagctgcagtctccagcagaggaagctcagtgcccagaccagtagtacacacaactgagacttctagaatgaatgaagaatgaatgaatggataaattggagtgaggcacttacagagataaaattcagtttgataagaaggaggcgtccttaaatcttgtgttttctcctagagttgagtcctaatgggggcggcatccttgtacggaaacacgaaaggttaatagcaataacaatagaaacctcgtgtttgtgtatggagagccttacgcttcccaaatactttcccacagatgacctcatttaatctttgttttgtcacagagatattttattcccatctaaaaaagtaggacacccgggatcacagtcaaaaaggtattaaactctgtgttggaatgatggtttaagctacttcttgtgacttctattccaattttccccatgtcatcacggctgattagagaataattatgataatacaactgagaataatataagatgtagagacttaagtcccatgtgccaggcactaatcacccagtttgcaggtgaagaaactgtgcatagagtggttgggtagataaaggcccccccagcatgggtgtgggtcccgaggaaaggcatggctcatttgccagggagctgtggtgtggacctgctttgcctcctctcccagaccccgccaaggtcatgcacctgcccagcagcagagccaggaggccaaccctgacaatctgactcctcaccactacctgctggcatctcaccacagctcaccggctctctcttctgttcttatgtactgcgtgggccagttccctgctctcttgttcttgtcccagcagcccaacagtagcaaaatctaattatcctaacctggaagaatcaaaggtgacattttctccacggataggaagctgtgctggaggactgtaaacattggttgacttatctcggggttctctttaaaggcacctagttccatggatgacttagcttccatgtagctagatgaccccagaatgcctgattttcctggccccaggtcatgcttgtatgtctcttcttggattggatgcttcgtctaatccaaggaatggctgcctttaatcaacccctctccatttgttcatcttcctctggggctgtggggtaaggcagtggagggagatgcttagagaggacatcatccttttcattttttctttcaagatatttttgaacagcaacgttaaagcccccgtaatgctgctgtgaattgttaacaagcatgtttgcacgtcacatctatcatgctatgtgcgcgatgttatgtgaagacacggcttgaagtatttttaagatctggcctttcatctctggaagcacaagaaagtatttgcagattggtctctggaatgaaattagcctagcacgttggctggttcctgtaaagtgtgggcatttctgtaagtggttctgagtcccttaatccttttgatcatttgcactgtgtatttttacacaggttcttttactttggagaaataaagtaaagaaacttaaaggtgagtttggcaagggcatcactgtgctgtttgtcaaggcaaatgaatcttgaatttgaatggtagtagtttcttttaaacaaccaagcttctttaaacctctccacaaataacgtcagtggcagattatgtctgaaagtgtttgctggcgagtggaaatctttcctgaccccatattgctgtcatgaaagaagagcctaatcccataaaatattcttgacagcctcgtgtcagttaccacacagctgtgatttcttatctgggctacagcctgtgtgacatttgttgtcacttcatggcttcaggtttctccattcagaagctcaggtcatagtaggaggttgagcttcatccccggttgaaacctggttcgcgtatgactgaatcctcttacgtcctcactgttgtgtgaaaaaactcatagggagaccttgatttcctcatctgtttaatggggaccatatgtctctggcaaaatmgttgtgagcaatgtttgtatgtctgtgttcacagtagcattgtttgcagtggtaaaaaggtagaggcaacccacatgttcgttgatggatgaatggataaacaaacaaaatacacccaatrgaatattattcagccctaaaaaggaagaaaattcagacacatgcaacaacatgggtgaaccttgaggacattacgccgagttaagtaagacagtcacaaaaagacaaatagtggattccacttataggaagtccctagagaagtaaaatccacagagacaagaaagtggaaagggggttgccagggcccagtgggagcgggcaaggggagttgatatttaatgggtacggaatatcagttttgcgagatgaaaagagttctggagccggatgattagtgatgattgcaaaacattgtgaatgtacttaatctgatggtaaattttatgttatgttcattttatcaaaataggaaaaaaatccatgagcattaaatggcatcaagtagataagtggctaccatatcattgttgttcactaaatcataaagtaacagctttgaccatgtgtgggatagtaaaatatgtggtattttaatggttctatgaaacttcatcttatgagtataccaygtttgtttccctttgtttggcttgtgtatttcttataagtattctaccattgtaataatgacagagtgaattttttgtgcatgtatatatcttttctattagttgaagttatacctttgagatggatttcctggatcacttaatcaaggtaaatgagcgtctttgtggctcttgctacatacacccgtggggtttcagaaaagatttagtgattttaccctgtcactagccaagtaagggcaccatttcattgtatcctcaacagcactaagatgcttctaagcaattttattaaatgtgataagagataatatgttagtgtttgaatatgcatttatttgctttcattttgatcactaaaaatgttggcattttgcatgtctcaatttacatgtatttcttcacataggaagaaatacatgtaaattgagaagaaatagcctgtttacgtcttttgcttatattttagtgtggtttcaatgtttttcatgccaaatatgtctgtcatgttgataacatattaccatttttaatattcagagatttttaatgcttatgtagttgaatcacttatttaaacatttcaaattacaaaataatatgttctactagagcaaaagtggttttacaatcacattattatacctactgtatctttttcccaaactctccactgtcattcttttcatatcttttagcataaaatctgtttagatgctaacttgaatgactatagtatttgaattaaaattatatggactagccaattaataataaaatattaatataataataacccagtataaaaggacatgccaattagagcaaagaagaaattaaaattgctaataaccatgaaatttgtgttttacttcactaataatataaattcatcctaaataaaacartagaatcctatcttccagctatgaattgctaaggattaaaaatgttgtaatggtgactgagactggccctcaaaaacgctgccaatggaaagagaaaactgggtcaactttactgaaaagcagtttggagctaggcatcaagaaatttaaaaatgtttagaaacattgatttagaaattccatttatataactaaggcttgaggcagcttcagaagcatggaaaaatatttacatttatggataaaaatatatttcagtctaattgcccaatgacaaggaatgattgaataagtagttggacaaccatctgatggggagttatgtattcattataaatggtgttttctaaaagttttagtgacatggggaagtattcccaatatagtggtaagagagaaaagcatgctgtaatgaatgcagtggaagaaatttgtgtgtgtgtgtgtgtgtgtgtgtgcacgcgtgcatgcacacatctggtaggcacccaggaagagattgataaaatttattgatagtgcttatgtggcagtagtataggtgatttgtattttcttttttctttcttttttttttctttgagatggagtctcaccctgttgccaaggctggagtgcagtggtgcgatctcggcttactgcaacctccacctctcaggttcaagtgattctcctgcctcagcgtcccgagtagctgggattacagacacccaccaccacgcctggctaatttttgtctttttagtggagacggggttacaccatgttggccaggctggtcttgaactcctgacctcaagtgatccgcctgccttggcctcccaaagtgctgggattacaggcatccaccaccacacccagctaatttttttgttcagtagagatggggtttcaccagattggccaggctactcgaactcctgacctcaggtgatgcaccctcctcggcctctcaaagttctaggattacagtgaactgccrtgcccagcttgccaaattctttactacacataaggtgactgaaaacagatagataaaaaatttatatagcctagtgatcttagtatggagggatctcttatttgccatgctctaagactataaaagaaagaaggacatgaatttcacaggtacaagcagtactgcaaatacccacccctgatccaccaaacctccaggaccaccactgagaacaggcctacttacagaggaycctgcaagtagacatatgtcaccatcattgtttaccacagagaagaattaggctgggaaaacacttaccaccctgctgggtatttaaatctgacccttgtcccastgttaacagcacagcacgtatgtccctccttaactcactgatctcatgtgaacgagtgatcagcctgttttttacaggtttctctccctggcaccatctcactgtggtgcagctgagctcactacatatagcatggagtgatgataaaaataaattggctctttccctttgcagagtttcagttcttgagcgctatgtcagggtggatccataaggtttcctgagtgagcttagaaacctgaaaacccacgtttgttttttcatgaacttaaaacaatttattagagcacaatgtagaagtcatcgcagcaagctccctggaagagaactgtatgcttttatggaaaaagaaccagtaacagagccttgagagagactcttagctaaagtctaatcctccttccattcttccttcacagggtagagtttcagcttttgtctgttgttttttttgtgaacaaaaaacttgcaataaatggatgttgtcagtaaatttcggttgtacgttttgttttttccaagaaaaaactggccatgcagaagtcgtccgagtggtgtaccagccagaacacatgagttttgaggaactgctcaaggtcttctgggagaatcacgacccgacccaaggtagagtgatgagtgagccagtatttaattatcttactaattacagctgggataattagtgtttgagctgcatggaagagatgaaccttgaaatcacacaggagctcaagaatatgattgcagacatttattgacggaggagaggaggggctggggagaaaaagggtgagagaataaaggcacagccacattcggcgcccctgccccccttacagctgtcaggggtgggaaaattcccacagaggaagacgccagacaatagcgatccgttcacctttgattattgcattattcctccttaatgcagtcttttgtctacaaaattaaagtgtctttccagcagctccaaagattcctgatttatggtttctttatttctctgagtttagcctttctcgtcttttgacgttatcaggttggatttttttaaaaaaatgtatgtggtgataaagaagaacataaaggtaaaatgcagtattcactaggtccacaaagcttgctcatttaaatatttcatttgttctctttggaatttgttatgtggagatattaatatatttgggctataaacaatggtggttggaaattttatttgaatgcatacacaagtgaaatattccatgttggcaaatatcattgtaatattcaataatgaagcaatttcaagatygcatcccagcagccttgcaggccctgctttgccagtgtgatgatctgatattatgcagcttatgaactgaaaagtcctatgcaatagatgtggtttttcacaaaccctcttcatttggcagtcagtctatttcaccaaagtattttctctttggtgtcagatttttgtgtagtggatatgcagtgttatttcttgatgagtgaagtttttctccaaatgtaaattgtgcttcatggtggaatcttcatatgcctgtagcagcacaggttggtgggtcctgagtgctggttctaagaaccatcccattctagggctttttgccagagggcaaaggtcagagatgaggcaagagcagcaaagtgacaaactcgagcagggtgaggcaggttcaggatccacgcagatctatcagggcagatgggggcctagaggtctgggcctaggaaggaggccgggggcacgatttccatgaccacaaagtctggtttgacatgggggaatgggtacctggtggaagagggatgaggtatggggcagggtagggaaagaaccggtaggacaagaacactctaatcagaaggttcacgtgtcaccctagcttgggatatgggacatcacttcatgtgggaaggcaggtctgtgggcctagattgctttggttctgcaggaagctctgcagtgaggatcataaatcagggtggtgacagccagtcgctccttctggtaagtcatcaatccagatggagcagacgttcagccatttgactgtcaaagtcaagggtcagaggaagatgataagagctccaaaattatcagtgaagacatgtatcagaggcccaggcaaggcctgaaggcatgtaggtgacaggtcgggtctgtgtcctttaatgtggccaactgcaatgccacgtcctgatagaatctccttaggcttaggcctggcagaattgtaaagaaggccaagtctgtcgtcaacttctctctccataccgctcttaaatgctttcatttgatcacatcttcattgattaattgggttgctaataccggcccctgaacctcggggggaatactactatgatgagggtttgggctgggagaactcacctctctgttcatcatttggccttctatgggctctgtgtttgtaatggtggcgtctctggggttaaaaaagattttccagatcttcacatcataggtggtaatatggagaccaaaacaaggcaagggcatggctaaggttgtagcgtgatccagtctccccagctgaattcagagaaccactcatcaacaccagggcaaccctgactgccccaggacccctccaatctgtggtccccacccttctgcctctcttatggaccatctctttccataggtcagtggcctccccacaggtgaggaagaggtaaggaagggcaggggatgatggttagttaagggtagggcgagagatcctccgtcaggaacctctactcagctggctttgtttttcttaagctagttttttagtttctattacatgtaacagtaacaaaaatccttactaatccacccattcaatccaaacaatcttatgcccattatatttgccaggtgcccttttattttttgtttttgttttttattttattatttttttgagactgagtcttaatcckttgctcaagctggagtgcagtggcgtgatcgcgtctcactgaaccctccacctcccaggygcaagcagttcccctgcctcagcctcctgagtagctgggattacaggtgcatgccaccatacctggctaatttttcatgtttataatagagttggggtttcaccatgttggccaggctggtcttgaacttatgacctcaagtgatccaccctccttggcctcccaaagtgctgggattgcaggcgtgagccactgcgcctagccaccaggtgtactaaatcactaaggcatctgggatacgcacgagtatccggcctcttggttaatgcacatggaaaatatattcctacaggaagaaaataattaattccaatatgctgagatcaagtgagcatacagataaatgcgcataagaccacaggctaaatgttaacatgaaatcattaaaacaagtatgtgttagcacttgaacattaaaggcaaaaaacaaacaataaccaacccttaagttcagaataactctggtatcaatggagttgatattcctggggaaccctgaaggtccaaaaacagtgacacatgtcaagtgtcatttttccaaggtcagaatttgaagcctgctcctcgaaggatggaccagaggcaggggagagccaggctacaaatgaacttggctatcactcactcaccacatctgaccacagctgcctaaatctctacttgaggtcacatggcaacctgtcacgtttcacagtaaaagttggtcttgaaaagaaagccgccactagagaagatgagggtggtgaagatatgtaagactgactgttcttactcagaaaatggacattttgaaagagagcagcaggttggatttggtggtgattctgatctgtgaggcmgtagtccactccaggttcttttcagaaacaaaagtgattactaaaactactcgagcaatgctcttgcctgtgccagaattgcttatcaacaaaaagacaaaacttgtgtagaagttgaaaagtcattgacatttgatgtgaagatgcgcccaggaaacatgatttccacagaaatgtgactcaagagaaatgtattttaattagcatgttgaaagattttagtacctttttgtaaagtcattaaggacttgaaggggccttaaatttttttggttataattcactgcattttataggagaagcagtatctacagtgatatttgcaaatgtggagattcttgctgatgtcaatggtcttactgtagtagaaacagcaagaatgtaagcttagagtcccctttcagttaaatcagatcttcatggcataggctaaacagagaacattcagcatgttctttcctgcttcaaggtgctgaagcagctctcatagtatctgccctaatggacatctagatgaagtccccatgtgttttcttcctttttttttttttttttttttccggatggagtcttgctctgttgcctaggctggagtaccgtggtgcgatcttggctcactgcatcctctgcttcacaggttcaagtgattctcctgcctcagcctcctgagtagcttggattacaggcatccgccaccacacccagctaatttttgtatttttcatagagatggggtttcaccatgttggtcagcctggtctcaaactcctgacctcatgattcgcccacctcggcctccccaagtgctgggattacaggccacaaggcatgaaccactgtgcctagccttctgccattttggagggagcaaagctggtaagtgagagattggaaggtgtaggctttttaaggtataggtgaggcccgagacctgttattccacagccactagacagtgagtctgaagaggatgccactccacggattagcctaaggaggaatgacagacatgctagcatcattactcatgtggtcagtaagtggaatagtcttttcttttaatttaccaattaccacagaacctctacttttgctgaaacatttgaatcccactgtttaagccaataggttctattctggccttctttcttactcatgggatgaagatagttcctttaggcttctgaggatagactggcaggtgtacattcctggccatggggtacccagactcccactgtctccaggcaacgtggtgggtgcctgagatttaggagttttgagttctggtccctggttggccccttcccaaccacatgattttggccaggacacttacccaacctgaacctccatttttctcatctacagaaaaagggataataatgtctatactgccgacttaatggtctgatgtaggaattaaataaaatagtgtgaaaataacatgaaaatggtataggtgccatgccagtgccaggtattgttgttacgtctttttcaacacaacaatacaattccatcagattttaattttacatttattcttacatctgtgttgcccttgattctttgtctgggtaagtatttaccctccatctactaaagtgtgggttttctacccaccgagattcttgtgtctcttgcattggttggaaagagttcagcattgtttatgttgtcttctgggaccttgctggtgctgacagtggtgatgaggctggtggatccttgctcaaaagcctccttaaggcttcttctcacagagtaatctaargaactggatcaggttcccagcatttcatggctggtctgtatcctcctaactagaatgacctgtgcatgaataacacaattcagacctcctagtcctgcgtrggactcggggcacagactgagtgcctcgagccaagccacaggtacaccaggcagagggtcttcagttttgtgtgacttcacccactaaatctgatttctcagttgcaacccatcttgctgtcctcagtcctggagcaagggagagcaatatttactaagcacctcttaggggccagtcttagcgatagatgtttcataatcctaattgcatttaaatctgaccataaccctgtgaagtaaggatcattgtctttgcttagcagaagaggagcaatgaggttccaaaagactcataatcttgcttaatgttagtggcggtatttggatgcagctctgtctaaagctcaggtctattttcttttccatacactagaggaatccaagcttcctgactaggaagacctcttctaaggatgcacattttttttttttttttgagacatggtcttgctctgtcacctaggctggagtgcagtggcacaattggcttactgcaacttctgcctcccaagctcaagacatcctcccacctcagcctcctgagtagctaggatgacaggtgcacgccaccatgcccaacttattttttgtatttttggtagagatggatttcgccatgttgctcaggctggtctggaactcctgggctcaagcaatccacctgcctcagccttccaaagttctgggatgacagaggtggccactgcgcccagctggggtgcacatttttatggatcctccagtgataacaattgggcttttagtacatttaaaaaagmaaatatattaaaatgctaccatggatttaattatactttaaattgcatgcctatcatattcaccacttccacatcatgtacttctggaaaagggaactattgtacacataatgcattctccaggctctagatcttgcctgctgcacagttggatgcgtggagcttttgtggcaactccaagccttcccagaggactgtggtctggaaactgctccggtatactccttggggagcagtggcctttgcagaggcctctggctgagagtgctggttgaccccaatattagggttcccccacctgtgtagtttaagaattttagctggtgtgcagccacccataaagacaaaatccctgagacaccttagagctaagtatggccacatgtctaaattctgactrtgggggccttagtagaagtgacagcgtgcagcttctgggtttgtggccttagaggaaggggcattctcttccacttcctcccttcccacaagttagtgtggggctgaagtggtggaccatcacgaagcccagggatggagcctgacccttgtgctgctagagctgtgagactaaggagccagagtcaccatcccaggctggatctttaggcaagaactcttgtttaaagtactgctattgtggttcattgaagccttcttattctcattttctacagcagctgaacctatgtcttgactaacacagccttcaactataagctggtgatgaactcccagttacccttctgaaagccttaattgcagtgttcccttaattaaaacgtctttaatcaaacctgttgttaagagtgtggaccctggggtcagagatgtcatggctgtgaaccagatcggcccggcactcgctgtgcggacaggcctcatttctctctatccacttgaccacgtaggtcctccagtagtctactaactggcctgtctcaccctttctcattccctgctccataatgccctgttaaaaacacaaaaccagctgtggccccctctggcttaaagcactttgccggttgcccgatttctttgggatgagatccggactctttacagtggccagtgtggcctgggattacctgattggcacttgcctttccaactttggctcataccacagttctccccagactatgccccatccatgctcactgtgcttcagttactgtcgccttcatctgttccattcctggaagacttgagctctttcttgcctcgcacactgttcctactgcttagcctgtccatagctcttggtctgccaccaacatcaggcaagactgcaagtctttggaacctcattgcttctcttctgctaagcaaagtcagtgatgcctacttcatagggttatagtcaggattaaatggaattaggattataaaacatctgccactaagactggcccctaaggggtgcttagtaaatgttgctcttccttgctccaggatcgaggagagcaagaactatgtgactggctccttctcctttaagtctcagctgaagatatcgtcctcagaaaggtcttccctgcccaccctaattaaagtagcagtcccagccctcrcccccatgaacttctgtactatcattctctccttgcttcctaactcatcatgaggtaaaatcacatgtttaattgtttattgcttattctctgactcctctagaaggtgggctttgtattaaatgttttctcrttgaactagtgagtgaacctctgtttctgcatctgtaatagtttgtgccttctcagtgtcggggcgcacacgggcgcggagcctgccgtgcagagcgtggcgcctggtgcggaataagcgctggctctaatagctgtcgtgctcatgccgcctgtggaagggccgtttccatcaccagctgctgtttgtttgtcttgttctttcgtgaatcccagtatttgtctgcttgttctctatcatttttcctcagctcatgttctgattacccctgatggcttcctattcttggttcacaccctttatcctcaatcagctcctcttcacccctttccacctgcagcacagctcccagttgtcctcagaaggcttggtctggtttgccccccgtgggctgcaccgtctatgctgttgggtttcctggggccccagggccacacatcctggccttaccgtgagctggggattctgtggggctcctcagcctgtgcttggaactagagagcctgcaaggactcttctctacttggtgtccttgggctgcatgggcttccctgccagacgtgtgcagtcaccacaaagccctgctccaggcgagttttttccaggtggtcccagggaatcgggtgggataggtccactccgtgttcaggaggttggctcccgagcctctttccaggtgcactgtggagaagcaggtcccctgtgctgtctactgggaaacattcattgaagggagacaaatcctattttccttctgttccccatcaacttggcaataaaatactgtcgttcgtatatttgaacttgccagattaatatctgaacttccttgtgctgaccccttgaagttagttttttaaaataagtcaccagttttgaaggactatccttttttagaccatatacaaggaatctatcatctgcaaataattagacagtgggaatgatattgtattgctaatgagcagatgtgcagactcggattggaagaacagctgcacacatataaaatgcaaaagctacccaaacccagcattatgaattctgaaagggatttcattcttttaaraatttcagaaacagagaaaaatgaaacaaaagaatttaactgatatttttattaattgttctttcagtcacactttcccttctatcacattatcatacgtgttcatagtatctttgctgtttgcaaaagtgttatttgcacttttaaatccttctgtcatataatactataaagcttctatttaacatttttcctttgcctttctagtgttacaagggtttggtgtctgcactctgagtgacagactcttactgaaggtctttcctgagctgtgcrcaatgctaagtgctcatgtgtacgtgatcccatttgctccttaaagcaacctatgaaccttagacccattttgtagaggaacagaaaggcccagtgaggtgaagtgatttggcacaagccacttactacattgcttgacggaggtggaattcggacttcagggctaaaatcgaagcctgatgttctttctgttgggtagcacatggccccacagtgctacacaattctatcagaaagcagaaaacatgacccactggaaacagcagcacattatccgatgattttaaactctttgtgatgtccattacaattttataatcctattaaggatttgcaagatgaagaagtccaaataatcaggcttttgaaaacttttagccaggaagagtttcacatatcttagatagtaatggttaggtcatttagaatttgaataaattgctgaaatggtatgaaatcactaaaaagaaatgaagtcagaagaattaytagacttcacataaaagagtactgaattaggtcacagaaaaatcagagctggtaacactggcaggaactaggatttctaggttccaggaatggcaggctgagttattcagaccaaattgcccactgaaagcagctccaaatgttgaataaaatacaactatatatataaagcatcacatcaaagggctgacagaactatgaggaattaaccaggttaaaatggaaggcaacacaggaacccagacaggtaagcagaggattagatatatctttattctgagcaaacttgttaatcccagaaaatgcgagctttgagagccttattaaggacgtagagggagtgaccaacacaattccagcacttgacccagtggacataagatgctgtaccccacacctgggggggcgccttcttctcaatcacacaaggaacatattccaggccataaaaggctcagtatgtttcaaagggattaaaatcatgtagctttttttttctcttaccataatgcaagtattcagaaaatcgtcttatgttagaaaatttaaaaatttctggccaggcattatggctcacgtctgtaataccagcgttttgggaggccaaggagggaggatcacttgaatccaggagttcaggaccagtctgggtgacatagtgaggtctccatctctacaagaaatttcaaaaaaactagctgggcatggtggcacatccctgtagtcccagctactcaggagtttgaggtgggaggggtgcttgtgcccaggaggttgaggctgcagtgagccatgattgtgccactgcacaccagcctgggcaacagagcaagagcttgcctgaaaaaaacaaatctgaatatcctagttatcaaagataaatcatgatggaaattgtaaaatactttgaatcaaatgataattaaaatactgtatgttaaaatcgatagggcataggtaaagcagttctcagagggacatatagagccttaaattcatatattagaagagaaaagaagctgagctaagcgtccatctcaagaacttagaaaatcagcaacaaattcaacccaaacagtataaaataaataatgaagggcagaaagaaatgaaatgggaagcaaacaaacagaagatcaaaaaagccaagagtcgatatttcacaatggctacaaaattgataaagctctgggaagttgttcaaggaaaaagtgagaagacacaaatatacaacattaggaataaaaagtgggatatcactacagatgtgggagattttacagaaaccaggaagatatgataagcaactttgtgtcaataaatttgaaaagttagatacattctttaaaaatatagtttaataaaactgaataaagacaccactggcttcatcagtgagttctcccaacatttaaggaagaaataattgcagtttttcataatgttttcaagagattagagagagatgcagtccatcttatgatccttgcatagtcttgataccaaaacttaactatgtaagaaaagaaaattgtaggacaatcttacttatgactatatttgcagaaatcctacgcaaactattagcaaactgaatttaatagtatataagaaaataatacatcatgaccaattttagtttcctccaacgaacacaagcttagtttagcactttagtattagcccatgtaattaaccaccttagcaggtattttaaaaacatgtatgattattgaaatagatgcttaaaaagtaytgaatacaattcagtattcataaatgatttaaaaacacatataaaagatgactttcttattctgataaggagtacatgcaaaagcctatagcaagcattgtatttaataatgatgcattgagaaactacagagaatgccattgcaatttctaatcagcattggagtgggggtcctagctcatgcagtaagtcaaggaaagaatacrtgtatgctgattgaaaaatccactagatacctatttatctttccccagccggacaccattcctcttctcccttgaagtggtcatgtgactgagttctggccagtggaatgaggaagaagtgacatatgctgcttccagacctggctcagaaaaacctgctgcatgatctgtgaacttctctctctrtattcagtctgcctgctgaakgctaatgccragggaaacctttgaagcaacatattgaaggtggtgaagcttctgtcagcctaggcccctgaagagttcatgaagtagaactgttaccatctcctttttattaactgctttgcatgattatgaaagaaacttctattatgtccacccactggaatttcagggtttacttatttaccaggaactggtaccttgaagtggagtgctaccaaaaaatctaaaaaaaaaaaaacaaaaaacaaacaaacaaaaaaaaacatggcattggcttagtagttaggcagctggaagatctaatattgggtcttgtttatggttggtaaacacaccaattctctccaaattgttttatgaattcagtgcaaatccaaatgagatcccaacagttttgttgttgttgtcgtcagtgttgttgtttttgtggatcttaaaagctaatctcgacatttatagggaaatgcaaaagtccaagaaaagcaaagatacttgcataagaacaagaggatgagaggacttattcttccagatatcgagtcattataaagctacagctrttaagacatkgtgtatctgatgtagggacaaatgaatagagagttcagaaacagacccactcatgtcaaagtatgacaaatgacacagttggcatttcatagtactggggaaataatggcttcttaatcaatagtgataagataattttcttataggaagaaagttaattggatttctgcctcacaccatacacaaaaatcaattccaagtagattgaatacataaatgtcaaaggcaaacgtacgaaatttcaagtagataattttcatgaccttgggtttcggaagcatttcctaaacaagacacaaaagcactaaccgtaaaggaaaaatatttgacaaatttaactatatcaaaatctgacaactttggttcatcaaaaagcatcataaagaaaatgccaagaacagaaaaaaagaaaaataaaaaataacaaattgccaagaacagagagattatatttgataaaggattagtattcagaatatataaaaaatagacttaaatgtatgtgcagtatttttttttagaaaagacagactgctgagagaaaaaatgggcaaaggacttgaattgtggcaaagaaacataaaatgataattaacgttattaatcaggaaaatgcaaattaagatcaagtgagattccattacacaccaagcagactgacaaaaagtgaaaatctgacattagcagactttaatgaattggcaagcatttagagctccaggaattcttgtgcagtcatgtggttttgtaaattggtacgactactctggaaaaatagttcagcatgtagttaagttgaagacatgcaaacactmtacagcaacaattctatttctaggtatgtactcaagagaaactcatgcatatgtataagagaatacatgtcaagaatgttctttacagccccaggctggtaatgttcattaagggtagaatgtataaatccattgtggtgcattcatacaatgggatattatgaagccatgaaaatgaagaaaatggaaggacctcatgatcataattgtaagtgaaagattcaaactgtagtataattgcatttatattaattttaaaaataggctgtattagtctattcccatgctgctaataaagacataccggagactgggtaatatataaagaaaaagaggtgtaatggaccccaagttccacatggctggggagccttcacaattatgaccaaaggcgaaggaggagcaaaggcacatcttattacatggcagcaggcaagagagtgtgtgtaggggaactgacctttataaaaccatcagatctcatgagacttattcactgtcatgagaacagcatgggaaagacctgccccccgtgattcagttacctcccaccaggtttttcccatgacacgtggggattattggagctacagctcaagatgagatttgggaggggacacagtcaaaccatatcacaggccaaactaaactaggtttattctgaatgtgtccgtgtgctaaagaaattattgcaaaaaccaggtgtggtacaaccagagagagggaaggcattgtcatcaatagagacacatggaagactctcaagggtacttggctgtactctctttcttgacattagtggtggtgatgtgagtattcactttataatcactaattataaatagagtaatagtagacacttaactgtgcgtatctattttatgtacctttgtacatttatgtcttatgtacttttctgtaattaaatctggaaactacaaaggtataatatgtcgattgctacttctgctaatatgaacactatccatgatggactagctttgtaaatgtgtgtgcacatgtgtgcttggtactgatttcaatgtaagcatgttgtaaatctcatatagtggggcactttggctgtaaaactttaagatttggacttgcaatgatgacctaaaaattttactattttgaacgttttctaatattttcattatttggccaaacttgggattttagaacataaacagacatggagtcccaaaagacattctaggacgcataataagtaaaaagattttctttggccaccataaatagaatttcccttttacacaaacaaaattcacactatgataacttttgacctttcatgaagaaatcaccacatcttgtcaaaataatttatgactatagaagtaatgtgtactccttactgaaaatcaggatctttcatttttctttttgcttttagatatggaataaatatgtggcacctctgttaaaaagcaacactatttcatctcccttgagatgcactgcgtgaaaaaatgcaaagaacattgtgcaggtgatagatagtgaccgtattgtgtggctgtcttccttttagaagagagccacataatatctttcatacatccctatattccaccttttttttttttacttaaattatatatatttacaaatcggaataatagtggttaagatcatggactttggagttagatggttccagatgcagcactggccttcaacaggcaaccagcctctctctgagtgtcagtttccctttgagggaatgtcagtttcaccgtggcactgggagagggcatggatatgggtttactaatatcctccaagtatttgcagaattgggtgaataacgtaataaagcacagtgcctggacatagtgagaactataggattgttagctactttgatgatccctctctctctctctctctctctctctctctctctctctctctccttcctcctcctcttctccccctccctctctcccttcctcccttttgatgaaaggagggctgtccattcatttattcagtgttttaaattaaaaatgagctgtcagttaaaatggacaggattaagttctcagataaagtgagatggttatattcatagggcttgtctcaaacacctaaggtaaaggcaaggtgcaccaggaggtgtcacctggataataagaagtgccatctttcactgtgaaggatagaggctcatccacctaggggaggacttcgggacaccatggcatgttttttcacagagaccctactttccagcagaaggtaggaggccaccccgaagcagcacctgggtgagctctcccagcaatgccagcatccctggtggtcttcctgtgccactgcagcatgcaggtagcctttggtgcagcagactgtaaggcaggatccgttttctcttagcagcagtctatagaagagaagaatgtggaggtcatgctagtaggagtcactctgttttcaaccaacatggacagtcctgctaatgagattgctcccgcaaagctccctaagatagagatagcgatttcagaccctgaggcgttgttcctgacttgtcctgatgttcactgtcagccggtaactcctgggacctcgtaaagtgatcacctagcaacaactcttagcataaacttccctttaaagttctcatkttcagacacatttatcacgtctgcaatcaggatggataaaacagagttggtacccaaagatgagctgaggcttaggaggccctctgagcagaggagaagtcatcatcttatgcttcattatagatgaagcgtttctgttttcctctgcttcctctggctctgccgagagggagagaaacctcagagcagtcttagggttgtttgtccctttaaaatcttctttggagaaagtggatggagaaatctcaagcagttggtagatgtcaggaggtcagttctcatcaagaatgccccaaagcccagtcctcattaatcagtttatagagtactatggaagcattttaagcacaaggtgttgtttctgagccagtaattctctttcyactcaacactgaaagtccactgcttgctttcctggtacatcaagacagccaaatagtgtcaataatttttcctcatagtttttcaaaagccaagtggagggcacagtgaactttgcaacacttgttgcatctgtgggaaagggggctctgggtcattgcttggtgattatgctcactcagggttccagaaaatactgtagctcatgggagtctgatctttccacgcatctctggtccccaccgtgacttgtcaagatacctatgtggttacacgcccaacccaccagcttcaggacccaccaggccccttgtcagaccttgtcctgcctcttcacagtcctcagaacgttccaagcttgttcttatttctgggccttgggctgggatgccccctccccagcaggtaccctacatccagaagcactttgttccattgtcctcgattattttgctgtaacttctcatgcatccattttggaaggagaaagggctttggtgtcggggccatcaaagtttaaatcgcaggatggccatttacctgctatgtgacctcaggtgggtcactgaatgtctctgatccataatttcctttttgtcaaagagggttaagaatatcttctccacagggctcatgtgaggatgaaacaagaaatgatggcaaagacctcgcacagggaagtacagtgtcaggctcgtgactactcttacccctccctccctcgtcctggttattccttgagacaagggattatgacctaattcttctgtagcctctagagtgtggaggctacagttgacacacacgaattctttctgctggagagaacatatttatttgcagaaagaggaaagacatataggagttattctatcatcaataacatttttctgtcctatctcaaaatataattttggttaattttgccctctggagaacagcattataaagcctgtttagatcaatttatgacagtcaaatatttcgtttgttttgtgattcaatgggtagacaagcagggccacttcttgtattcccagccgctcctggatgttggttctttcttctaggttttcagtctgttgagtttccagtcatctttcccagtgaagcatctttctcatctgggcttcacgcttgagggtaccatgctcatcctcttgagaagcgggcatcagggctttgacacagatgcttcctgggttacagctgcttttgcaagcagtagcagttccttccaagtccctgaaggcaccgcactgctccgcagtcctcacctttgttctaccttcacccttggcgcccacctgctgccaagacaagtcacttccttgatccagcctttgagacataggccccttccccactgatcacgtgaacttacccactccctttctgaaaccttgcattttttttaacctgcacagattttcccttaacacctctaattcttgcttatgcctgctggtctctgtttcccctgattatattaggaatgtgactagctgaaacatgctactgggtccaattcctgaatcccagtgcctggttcattttcaccacaacatggtggcctacaggggatctgtggcaaccctgcggctgtttcactctggggcactgtcacactcagatagaaactgactatcatccacccttcagctgctgagactggcagaaaatgctctttgctgactttaagttgcaggctagatgggtaggtgactttagtcataggtgcaggactcctgctatgtgccaagcaccgtgccaggaatttacacagacattgtctcatttcctcatccaccaagggagggatgatgaaaccttccatacaggtatctccttaggacccaaggaaataatatgtatcatagtgcattacatgtgacaattggagtagatcgttgtttaagtatttcatgtaaaagtatgtattcatagaacatctagtatgatccaagacctgtgataaatctacctgagttcaaagatacttgttgtaattaaaacaggcaaatcaaaacagatacatttcatgcttgtttaaagaaaatgctgtaaacagaaaattaaaacaagcacttagcaacacatcaggcacagggaccatatgaaaagtgtcaaaatgtctcagcattgtgcccagtttgagactggcactgtcgcctagtgaccgggtaaccctccctgttttctgctttcctaggtatgcgccaggggaacgaccatggcactcagtaccgctcggccatctacccgacctctgccaagcaaatggaggcagccctgagctccaaagagaactaccaaaaggtagggattgctgggctcctagcccctggcttaggccaccatgactagggccaggttctgattttagagggcagtctgctgcttttcaactggaattgtgttttatttgcacatctcttagaaatttctgtcagcctctaggagtggagccattgtgtctaatacgtgtgctaaatgaggttttaagagtaggcctgggccagggccagtggctcatgcctgtaatcccagtactttggggggccgaagcagaaggatacttgaggccaggagttcgagaccagcctgggcaacatgaagaaaccccatctctacaaaaaatacaaaaataagccaggcatggtggcctgcacctacagtcccagctacctgggagggtgaggtgggagtatcgtttgaacctgggaggtcaaggctgcagtgacctgtgattgcaccactgcacttcagcctgggtgacagagcaagaccctgtctcaatgtaaaaaaataaagagtaggcccttatgtgtttgcctttgaatcactcatctagatgaagacacagcctgttaaaataagtctttttccttctctctttatttctgtctctgtctgaaactctctctttttttcttccctctgtattagttttacagggctattgtaacaaacagtcacagcctggttagtttaaacagcagatatttattttctcacaattctggaggctggaagtccaagatcaaggtgtcggcagggctggttccttctgagtgctgtgagggaagggaaggatctgttccaggcctctctccttggcttctagatggctgtcttctccatgtttatattcacatcagcctagttttatgtgcgtgtgtttctttgtccaagcttcttgtttttaaacagtctctagtcatattggcttagtgctaaccctcatgacctcgtttaacttaattacctctgtaaagacccgttctccaaggaaggtcacattccgaggttttaggactccaacatatcwtttggagggagacacgattcaacccgtaacactttctcataacagtaaattgaattatgataaaagtagttctcggaaatatatacatgatatcacaaaataattattttcagagttgtgtacccttttttaaaatcctccaatagagatttagttgttttaaaaacaagttgacttgctttagtttttagaactttgtgatagtacttgtattttatttatcattatattttctgatgtggatttgcatttgacagtagagctagaagctactataaagctaatctatgttagaattwtgtaaaaagtcaggtatgcaacagcccccaggaatgagtgcagagacgaggaggctgtaactagagtgtccactggtgagcaagtagaaggacgggtgactcaaggtcagttcgactatgatgagcggagaggcctgagggaggcgctgacagagcccattccttccttggcccctcccacctccctcccagggtgatgtctgcttggctggtcatggtaggcagcctgtgggatggcccccagtgctctctgcccatatgtaattcatctccttgaatatgggctgcatttagcaactcacttctaatgaatgacagcagtgatgggagcactctgagactaggtcattaaaagattgtggctcgtattgtgaaaactctctgttaccgcgtgagagatggtaggggaagccagttgcmacgtcatgaagcagccctgtgcagaggcttacatgacaaggacaaaagcctgccaagaactatgtgagtgagcttcgaatcccctcaaccccagtcaagccttcagatgagactgcagccctgcctgacagtttgattacagcgtcatgaaggacttcaagccagaggcacacagccaagctgtgccacagaagctgtgagataataaatgtatatactttgaagctgctaagttttagagtaatttaagtatacttgtatttccattctaaaaaccttttacctatatattctttctcttatccctttttcgtaatggcttttgtaacagtggtgggctaacctgggcatttatggtggtggttacacatgcagtctctagcatgaaattttctcaattcacatgtcatctgtgcagtttattatcaagtacctgmcacttagaaagccatawgttctatttgactcaagcagacctatgaggatgagggagaccccattatccccattttccagatgctcaaagacagagagcaatgaccttagaataaatgaaattaaagagaagtaagactggatgcagggagatgagttgggcagctattataggattccgggccagaagtaatggaagctttgtctaggatggtggaagtatgggtgggagggakggatatttaggaagtacaaagaccagaacttggaacttcactggaagtggagagtcaataagagggacaggtccaggtccaggtcatggctggtgattttttgtacaagtgtacagagaagcagaggcagatttgtggggaaggtaagttaagttgtgaaagtgcagagtctaaggtgcccatgacatgggcatccaaggggctgtttggaggagccatgggctgtttctgccttgcagggaggattgttaggactgctaactgggctaatgcttgtgaaacacagggcctagcacrtggtaaatacctcataaacaggaacccttattattattgggagttrtcaacttatatttgctaaatgaaaccccagttgctgataagattacttgggaaaagtaatgagataaaagcagaagaggcagggcacagtgrctcacgcctctaatcccagcactttgggaggctgaagtgggcggatcatgaggtcaggasttcgagaccagcctgactaacatggtgaaactcggtctctactaaaaatacaaaaattagccaggcgtggttacacgcacctgtaatccgagctactgaggaggctgaggcaggagaaatgcttgaacccaggaagcaaaggttgcactgagctgagattgcattactaaactccagcctgggcaacagagtgagactccrtctcaaaaaaaaaaaaaaaaaaaaatgcagaagagagggcttagtacccgaggaactgattcctccacttgagcggtgggaggggaactgtccaaccaggcaggacactacamtgggcaccacaggaaccaaccccaaccaagaacttaaaaagtggttcaattgtttcatcccactgtatttaattataaaggcagtatttataactactactaaaagtcacatatgataatgccatctataaactcccttatgtaatgattcgtagttctctagggtaccaagagtaataccaagcgactctggaagcatattaactgccctccagaatactgaaatatgatgatatcctggtgtttgcaatgaagattttcagttcaaggccagtgccttccgtgtgatggtgaagaggcttatcaccgaattttccagtttctatsccattgtagtttctaccctcagttttgaggggaacccacgttgattttagataaatgatatccataggaggtaaaatttaggtattatataattaattaatgagctgctataattatcctttcattatttttgtagtttttgkagaggttaatcttgtaggcagttgtgctgaccagatgttttctgggtgttctgaacccaagcacatgggaattaaatacgtgtgtgtgtgtgtgtgtgtgtgtgtgtgtgtgtgtgtgtgtgtgtctgtgtctgtctgtctgcatgtctgcatgtctatgtgtctgtttggcttttaaaagtagggtctattttttaaataaagattgggactcctgtgcctttagtatcccgatagccattgctgctcacattactgcatataaactgcttaatcaccaactcaggggacaaatgctgtcatatctcttttatggttttgcataaataaaactgaccctagattccactgggagatgagttgaaagttcagtgttttcgtaccagctaattgactgaaacccagagkttcagactagaccagtgcttcctttcagcaccactcgcctttccgccatgatgctgtggtctcttttgcactgtccagtggagggcctctggccacatgtggckgttgagcacttgaaatagtggctcactggctcagttcctcagtggctagtgtgactgaggaactgaatcttttaattaatttacatttatatttaagtggccacatgtggctggtggctaccatttagagagcatagcagttcattaaggggtgagcttgtgcgtgtgtktgcatgcccatgtgcattgtagaggggtggagcatgtcagtctggatccctggccctctgctctcactatggcttatcccaagagcgggacggccatggaacatgggacggccatggaacgtgggttcctgcccatcagagtgctgcaccgggagctgctctcaccttttcctgcctggagaccacagcatgagggtcaagttttttccttttcaggaaccaaagtgtctctttgtgtaccccatcctggtgagcaatagagctaagtggacatccatgcctaggtgaccactgtgattttyatcttagcttagcttagcctgggtcccacagaaagcagagcccaagccagaggcttgtgtgtgaggattcactgagatgtgtggttccagggagcaggaataaggggcagagagactggggaggaaaagaaggaagaccccatacaagttagcccctgccactggtaactggttgtttgagatttatgaaatgactaggcattcgggagaagatgaggaagcatgtttccattgaatgccatcagtcataggttgattctgcacttctgagctgcacrtgtgtgagctcagggtactgtgtgccagggcaggaggcaagagacaagaggcacatggcgttgagtgtaagattgggcaatgcaggtgcwtaaaagctgcacaaagtgaatgggggcccttgcagaactgggtactgtggctggcctagcaagaggcagatggggccacagggatctaaagtgatgcattagtgtcctctgggtccactgtctccaaagggtccttctcactccgatccagggaaggcagctgactgcaatggctcaggaatgatttgccacgatggagtgactttctggcacctctgatagaggtgagaaagaaaaacacagttcaattttagcagagtgcatcctgctgcagtcatatggtgatataatatgtacttttatataggttatataccataattatgtataatacgtrtatctatataatatatagctatataataataatagtaatactgttagaacagcaacaacagtaccaacagagtacttactaaatgctaatcaagcagttttaagtcatgtatagatcttaggtgtttatctgtrtacatatatttgtttagctgtagatgtgtatctctctatgtctttatataaagttaaatgcattcatgtatttatgaggcccttttaagttttgaaacttgaatgaatttctgactgtttattcagttgatataactgatratacaaacattgcaaaatcagcaatttgcaatgcctgtgagaggtgatgttatcagctttgataccrtaaagaggttgatcagtgstttagcctttaccttaaaaagttatgtggtttctaatacattcacaaaatggggaaaattgccgatctaaccaactgctttattcactgagggaaggagagcagggagctgaagaggtgacccccggactgggcttycctgtgttttatatctagggtaagcttgaacaagctcctgaaaccacagaggtgtttaaggtagggagggtcatttcttaacactcctsgattatggtctagaactctgtactgtagtcagaaacatttagtttgatttctaaaagtggggaaattctgcccatgactcattctgttcattttacatacactkctttcctcttcagaaggcttggtgtttctggccccatcactacattcgggacatttgtcttctttgagcgctgctgggacccctatacactaactgtaatgttgacttaggttactaatttaatagtsttcttcactagcctgctcccagtgaccccctagtacccagcttcttcagcagcttctttatatgtgaagtttggagtgacagtattgcttaccacagagcagccatttgaacataaaattagctgattttatcacagggaccaattgttgagctaattagatgtgcagtactgctgaggagccagaaaccaaaagtgattttccattgaaactgtggttttctgcaaagttggctgggttgtggataccagcctcaccagcgactgtcagagttttggctgaagaagtttgctcatttctaatcagattaaaagaggcaggaaagacttaaggaggaggatggagtcttaaggagtgaaacttgaacttcacgctgggtttgctgaccttgaacatgctggattctgcttacagaatttgacagckgcttcatatctttggtgagcaaccctaaccctaatacaactttgcataaaatggaggggggtgtttttgccttcaaggagaagacttgataatcttttcttagcctcattaaaaaaaaaattttcctcaaatctttggtggaattatttgcttatagcactaattgcaagacatcatctaatgtattattgtttttggattgtcaaatatggacaatttatctcccaagtgagcccatcatgagaaacatttcccagtatcctaaactgaatgtggcctccggtagagtgagggtggttcacgtgtaattcttccatcctgagaatgtgactccagctcatttaggaattaaatcttttcccactgagaaattatgtttcttgaaatgtgaaagacagcaaatctaaagagcattctcctggccatatgacctggctccttctgccagctcttcaagtcttcaagaaagcacaatgctttctctgggtatttctctcgcgaaaaagagagaagaaaagcagcrttttcctttgtatatattttacaatatattaagttctaataaggataaaatgtttctggagtcattgttaaattacccactgtgtttcaaatataaaacaktgttttaaaggctgtatctatccgtctctcagtgtttgtccacccttccatccatccacccacctgtccctatcatcagtatatagctacaatctttaaatatttgccataattttatcttaaacttcaactatctagcaatttattatctctcatctctgcgtttgtttataattaatacagggtcattttaaagaaaagttcccaaagtgaaaggtaaaaaaacagtatgcatgtacaaatgggttccagctagcattttcaaaaataaaggttcagttttgattatttaattttcttcctgcttagattgcagccagatatttagtgactccctaagctcttcagttaagccctgacaaattgtggtttgactggtgtgtgtgttttgttgcggggagtcggggaggaagaagacagtgtcactaccaaataacctacttggctgggcacggtggctcacgcctgtaatcccagcactttgggaagccaaggcaggtggatcataaggtcaggagatcgagactatcctggctaacaaggtgaaaccccgtctctactaaaaatacaaaaagttagtcaggcgtggtggtgggcgcctgtagtcccagctactcatgaggctgaggcaggagaatggcgtgaacctgggaggcggagcttgcagtgagctgagattgcgccactgcactccagcctgggctccgtctcaacaactagaacaacaacaacaacaacaaaaaaacctactcacctgcgctaccaatgcagtcattgctgcttttctttagcatagtttgaataccatctctatggtaattttttttttttttttttttttttttagtatcagtgacactctgagtgtaaatgacactcaaatttagggtctagaactaccctctggactccagatccccataacaaactgtctacttgttatcgccacttgtgtgtcaacgtaatgctttctaaaatgaaagtttgattattgccaccccctgtaaacaagtcccatggcttcctcctccctcctccctcccccctccccactcattgacacccttccccatcgggtcatcatttaacttgcctaactaagcaagatcctcagaagtcatccctgcctcatgcctttccctcgccttttccctccaatgaatcagattaacagattctacctccaaaagacatccccactgtgctcgcttctttcattttctctcacgttcactctcatgatttaagccaccattatctgttcctggacaactgaacttcttacctctccatgattatgaccacccgcacaggcagcagagtgatattcctcagtgtacctcgggtcatttcccttccctgtgtcagcatcttccacggcatctctactgtatgtggaatgaaatctgaactccttygcatggtctaccaggtccttcaaagtcatgtcaccatcttcccatgagacatctgtaacttctaatcagagagcctaattatcacagtatatctaagatgtagcctataattcttaaagttcagaacctttgaataaggctcaagaactttccagagaactggggactcactatgagaaccacagggactcaggaaatcttactgttgtgcagtgaacctcataaaggatggttttatacttctttgtatttcaaagttgatcccttcatggactcactgttgccacagagagaccaaattcagaggctgtggacatgctgcctggttgaggctatgctgtatattaaaaggaaggattaaccatcttgttcttgaccctaaaccctatcctgcaaactctcttgacaccgaagttgytattatgatcgtacaacattatttggtaggattaagtcagtgggtgatagatgaaactgccttcctctcactactttgccaaatctctgacttttttgtccctgtgttaatatcctatagctactataacaaattaccacaaactggatggcttaaaagcaacagggatttattctctcatggttccagagggcagaagcccaaagtcaatttccctggacccaaatcagggtacyagstgggctctgctcccccaggggctccagggaagaatccctccccggatcttccagcgtytggtgggtgccaccatgcatggcctgtggytgcatcactcaagtctmtgcctctgtggccacctgcctcatcctcttctgggcatctgatctcgtcctgcatctytctaataaggacactgacagttgcatttagggcccacccaaacaatcaagaatactcccgcatctcaaccccccttatttagttacatctgtgaaatctgtgccatataaaataacattcacaggttttaggggattggaacatggacattttggggagaccatttttcagatgaccacaggccccataatctggtctccaacctgccagtgtcatgtgtccaccccaaaatgggagactgaaaytgggggctcttcctcgggctgcttaggagaggtgggcgttgttcactaggtgggagcgcatctggcttgccctgaaccccagaacacactcaggtttcccagcgagatgggatttgatttcctctctcgggggtctttatctagttttgaagagaggtgaaaatttgcaaaagtttatcccctttcatacatctctaccttcaaaacagacccaattttactgctatactacttctgaaataaagtggcataccaaaaataacagtagaaaaaaataaatcctaagagctagaaggatatttgggagagaaaaaaatgtgtgtgtgtgtgtgtgtgtgtgtgtgtgtgtgtgtgtgtgtgtgatcaaaaagcatttggatgtttggcaagagtggtctagcactctcttagtcacttactctctttgagccctgacttaatttctctgataccaatttttaaatgatctaagtgtggataacaaaatttcccaataggttcattataagaattaaatgtgatacacacacacacacacacacacacacacaagctggcatgcagtagtgacccaatatacattattgaagctgagccccttcagttttatgatccagaaaatagttttaattataccaacccaaatgagagaaattaaatatactcaatgaatatttagccatgctataaccatgataatataactgaaccagataattccccagcaagaggtatatacagatcctttgtgttttcttttcaacatctataggctgaaaatggctttttctccttattctcccgtcccatgttcctcagtaaattaattaccttatcaaatattaattatgtacagattcattgccagacttgcattacagttgctttaaacaaagctatctgaggcaaagtcttgtgaagtttgtggtaataaactgtcccacatacagtcacagaagctcacatgtgacaaatgctcttttctgcagagaatctcctaggaactcgtctcccattttctacattaagtaagcttataggaggcttccattcacctgtgtgtccccagtgcctggtgctgtgcttggtacctagtgattgtcaacaaatatctgttgacctgaactgaagtgatacagcatataaagaagcccgttttgttgccccttgttatggaccgaatatctgtgtccccccaaattcatatgttgaagcctctacccccagtgtgatggtgtttggacatggggcctttgggaggtgatcagggttagatgaggtcctgagctggagctcccgtgatgggactgctgtccttatacgaagagacaccagggagcaggctcttgagcactctattgctgtgtttcttgctgcacacagaagtcatgtgaacacaaatagaactgcctgcaagccctgagaagargacttggaataaacctaccttgccagaaccttgatcttggacttctcagcccccagaactgtaagaaatagaagcctgttattgaagccacgtagtctgttactttgttatggcagcccgagctgacaagagagccctgttttgtgtgctgcactccatggagcgggggcagagcactggcttggaggagaacaactggctggagccctggctctgcctgtagtgaccgtgaccttggagaggtctctatggcccattcttcttttgtaaaatggggaaattaagaacagtggaatgttgtacggcttttcggtgctttctcctgtattttgctgggtaaacttcacagtcacacacaggctagggcaggatctgttctctgacttgcctatgaggaaactgaagctcagaagtgttcattcacattcccaacatgacccccatagtaaatgtagagagctagagtcatttgacactgaattccataagcttttcacccatgctgtgtggcgatacatgctaatctgtcaggcattttacgaatacagtcatccttcggtatccaatggggattgcttccaggaccctctgaagataccaaaatctgatgatgcttaatcccttatataaaatgacatttacatataacctatgcacatcctcttgtgtactttaaataatctctagattacttatacctaatacaatgcacatactattaatatattaaaatagttatgctgtattcttaaaatttgtattgttgtattgtttttattcatttatttataataattttgatctgtggttggatgaatccaagcacgcagaatgcaaggatacggagggccgactgtatcagggtttaatgggtgactgcagaggtaaggctgtctacagtgacttcatcctgcctttctagagatcctcaaatttccaaccatagttacaatataggatcagcatatcttcctttctgtcatgaattgagaaaatgtcatggttatctgtttctttgttcccagggaaatgggtaagttgcatgctagaagcatcccttctcggtctgttgtattctctatgctgcaatgtttaaaacccatctgagtaccgaaagactgttgttttcaccaacactgaaacatcatttatttgcattggaaaaccytaaatagacatgggtaaatgtcagttgatatgttatggtttggggattacatagctcttcgtctttaaaaaattttttttatctgtgcttttgtttaaagcatgaagttatgatttaaaatgcccatggaaaaaccctgaataattcattgacttaccttagtcaaaaagaaaaatcccccctccccaccgtatgcctagcaatagggataaaattcttcttagtccctttctgtagctttgaggttaaaattaygggtgttattatgaactctaaataagaacctgtgaaataaatattttaaaagtgcccatttctgggaggcaggcacccatatttctgtgtatgcagccacgtagacagctagatcttaggcataatggtttagttgcatgtgggtgattattttcatttccacttattactgtgtgctagactccctgtgtatgagtacagattgccctttcttgcactgtatttagaaatctctgtattacccttgggcatttgttcattaatagggggtggggaaaggaaaagcttgtaataatgggctttacatattaaactgtgtgcatccgcatttgggccaaatggaaaatctggtttgtatgactgccctctgctggctgtaggcctttgctgcagtggcaggatatgagtccctgggtggagcccctgtgcagatgccggtatcagtcttttattcacttgcactgagttccatccaagtacatcagaaacagcctaagattctacctactgcccaggttgatggtggaagacagcattcttgtgaggatcaaggagacattttgattttagtagaagtacagtagaagtatagacacaaaataatcctggccaacatagggtgatgtttgaatgaatgaattcacatttctccacgggccacactcctactcatctttcagtggcaacaggggartgtttagtggctcccatatgtgatgtccagaccccttgtggaatgcaagatgattttacggtgtatccagatgaatcttttaaatctcagttatgtgtttataatatatattaagaaaactgcagwgaatgtttgaagcccacaatttcctgaaggtgatggctgaggtgaagagcaggaaatggaacctacacacacagctgcattccttgcagagatgcctcttccgcaagtctttgggcggagaaaaaccacagggaggtccccgatgacttgggcagcagtggctctgtacttgctttgtgtatgaccttgggttgttgacctgtctaagcctaggttttcttatttgctaaacaggataatagtggctacttcttaggcagttataaggatgatatggtgtatatgtaaagtgtctgtcacagaacaggggcctgggcaatgccagatgcttctttttcagctccccatcccccaggacgcttctcagagccggcccccctccatgttcgcatcacgcttggcttgcatctcgtttcctctgacccttatgagagttgccacgtttcttctccaccccaccccccccacgctgagtgggaccttcccttgctttgcatctgtggcaacattccatgagcacttcacacaaggcaggcactctgtgaatgtcaggtgaattaaacccaagtgcaaaatacttgtaagcagcattttcccattctccaacacattcagagaatttcacctatcagattaggacagggcctatacgtttttctccccctacccgccattcgtgtggtctgataacagcagcagcattaagttcccgtccattggctgcaagcagggaggaaaaaaggccccagcgcctactgcctgctttcctgcctgcgttaatatcatctcttatcttaccaactaacatataggggtgtgtgtgtgtgtgtgtatttakgtgtgtgtgtgtgtgtgtgtgtgtctgggtatatatacacacacatttatattcgttaatttccgtggaaaagaaagggatggcagcagaaacattttaaacacagcatttcagctagggtagggtctactttaaagacaacaaaagggcctttgttgttctggcaggtagatggataagcctggccctggttcagcctctataaagtggctccggagtgataggatcagagaaactaccgggggcgggggggaggtgcagggacgcttttatttctgtggcgccaagagtgaagcagggtttgccgtttcctacaggggcagtgcgtttgcgtttcaaattcccgttgattgtgtcgcagcccgcgtggtcccgagctccccggcctgcgcctgcacggccgcgggacgcccgcttgcatttccgccaccgaggcaatgttcatttaacgcttccagagatcagagctttcatgtttgccacgaaagccagagagccgggagcacctcaggagcggagatgaaaggccatttgtgtttgtgcatgtgtatttagcgcttaaagggcaggaaaaagaaagaaaatagatggtcccgctttgcacttacttcaaaatgtgccttactccctctggtgggaccatttaactccagcgcgccacccctcccccgctctsgccgctcccgtctgccccgctgcctcggcccacgtgatggctgttcgggccccgccgagccatcttcccgttgctatggcagccggcgyggcgagcccgcccattggctgcaagcgaggaggaataaaaggctctcgtgtcctaggtctagtgccctgcgccatggccccgtgcaggtagaggcctgggcatggtgcgttgcaggacgggccgggcgcagggaccgcccmccgcaccgtgcgccccacccagctgtccagaaacggtcagggtcaatgtcatcagcttctccatggaatgggaagcaggtgaaggacaaaagcaaggctcataagggaaagtgagccaccttttccttcacccttaacacctcccagctctgttttttttttttttttttttttttgtagtgtttgaatttgaaatccggccctgtgaccctttctactcacagacactgcacgtgaggcctgagcctaagtttagctgtcagattccatttaccttggccatgccccgtggctccaaagccgcgaggacagcactccattgcgacgtctactcccgagcctgaatgtttcgaaaattatcttcgtcttgctgggttcgctgctgaactggggaggcgattggaattaccatctggcctcagagctgcgggtgactcttgtcctgaccccgtggcctagtgaacagatgaccccggcgcctgatcttgtacctggtcaaacaggtgtggagaagtcttggaggggaactgcagctacctgcctcgggctctcttcggctggcgacttgggttccctgctgagtgagaaagagagccagccacacccagagccttcaatccccagagggagggcacccactgcgatttggctgtggttggtcacctgccttccccaacataggaccagtcagcagatttgggagtgcagaaagcactttcacaaacattctctcctctgcttctcataaggagcctgggaggctgtcactctaatcgctgccctccaggagaagcagctggtaacttgagaccacatgatacgtacatgggggagcccaggatgcacactcccgctccctgattccaagctctgtgcatgctctttccattctgtcactgggccaggtagattccctctggacatgtcacaccctcacagatttataaatagggaatgggctctaggaggaagatcgctcctccctttcttctcattccgtatcttgccaatatcacattaaaagaatatgtcactagtgtttaatttgtcaagatcaggggctaatggttgaggattttttgtggttccttctgctggcagaaacacatttgcaaacacaaaatcttttaataaaatakcaagatttagtaagaaagaaaaatastgtgagaaaaaaataggacctgattggaggaacattattatgccagagacacttggttgacttaaacactaatatattatttttatacatattcacacaaagggtgctgtgtggtttcaggaatccacagagcctaacacccaagcacatgtgatagaaaaaaaaaattttaatccttttttttttttcattttcatttctgtttggcttctttacaaagtcgtcattgaaaattgctgtatggttatttttccctcttgtgttacagaccaaactcagtgtctgatgtacagtggaataagtgaggaaagagacaatattgggcaaaccagtgaaattaggctcttgtttacatgagtagcccttactgagattcagctttttgttgctctgtgtagccttttgatgtagattccagagttgtaacttacatgataaattacaagtctgtatttattcatacattagagataggttatttttacctttgtgtgtgtgtatacacatttgcttggaatcggtgaatttctaggccacattgaggcaattgaacgctctttataagcagttaattgtctagacccaacgtttgctgcaaacacagtctggggcaaaatgggaattaacatttttacaaagacaggcatagaaattctaatccagcgaattgtttcctttctctggtagcagggctgagtcctacctggccacaaggctgccattcacctgtgtagcccagaaaacaatggtaaagaccaccagagataagaccagctaatccatgccttgtaatagtcaggtttcgcaattcacatcacctgtctgcaaaggtaaactcacaaacccctcctgagatatgtgtacagtcaaatgggatcactgctgtcgctaggccagcagctctagaagcctatgttacttttttttttttttctgagacggagtctcactctgtcacccaggctggagtgcagtggtgcgatctcggctcactgcaagctccacctcgtgggttcacgccattctcctgcctcagcctcccgagtagctgggactacaggcgcccgccaccacgcctggctaattttttttatttttagtagagacggcatttcactgtgttagccaggatgatctggatctsctgacctcgtgatccaccagcctcggcctcccaaagtgctgggattacaggcgtgagccaccacgcccggccaagcctatgtcgcttttaagatgaatccaaaaagactgtgtgctactaggctacagaaagcagcattaagtctgatatacatcaatccatgttcaagcagattcctctctgtctctggaagttggttaatttttctggtcctgatattggatattgtcacattttccttgatagtgtcatccggtgaatgatttttcatcttgaaccttatactcctcctctctcggcagctggtgcttccctgttcttcctcagccatgctggggctcactgcagcctcctctgctcaactcgcctgggtgcagccatcttcaagaaaacattattaaagcaatattattagtatgcagcaaggtgccttctttctgctaaatcagtttgtaaagtggtcctcacaaatgcacacattctttgttatgacagcagggcttcgtgtttctgatgcaagactaataagacttggaagtagggaggtaaactgggtggcccaggaaagcaggggttaggggagttgatagaagatatgagaaatgaacctaaggggtgatcaaagagcagccaaagaaaaaaatatccttaagtgggagaaaaaggcaaataggacgtgtgaggaattaggcaggagtaggaaagaaaactgtgaaccactgtatgcacacttgtgtgaaagaggaacctaggaaagtgagccccgagaaagcaatactagcagaaagcaaaaggtgctcaagaatcattgtgttgtttatgttgagtgaaataaggcaggcacagaaagaaaaataccgcatgatctcacttatatgtggaatctgaagaagttgaaatcctaaagcagggaatagaaaggccagaggccagggtggagtggggaagggaggaggagttgttggtcaaagggtgcagagtttcagatccacaggaggaatagggtttgagatctgttgcacagcagggtgactgtagtcaataatgtagtgtatatttcagaataactaagagcacatttaacacgtctcaccataaaaaaacaataggtaagtgaagggttggctttgctaactggcttcatttgattattctacattgtatgcatatattaaaacatcatgcactccataaagatatacagttaggatttgtcaatcaaaaataataataaaaaatttaaagaagaattgtatagaaagaaaaacctttcaggattgagaaaactctgtgaagaagtcacatagaaattctccaagaagtgccacctgtgtactgaaagcccctttaatggacttttgtggtgctttggtgattcatacaacttcagacaaataatttcctaacctgcaaaactgagctagcaacccttgccctgatcactctctttgggggtgtttttgaggctctagggagctgatgtgcgggcaaaggttataatccagaaaatgctctacaaatttaagtaaggttttggcagaattgggttgtggggagcaagtgccaggcmagtttccagtccttgccaaactgcattttctaagtgatgaaagatctggcattttattcttttccattttttaattcactgggtttgttcccttgttcttatgaaccttgactgcagagataagttgacagtggctgacagatgaaaattttcattgatctcctctctggtccctgcctttcctagccccttggctttggaatgaaaactgtaagtcagggacacccacgaagcgatgatgttggagttgcagtttgtaaaactcttacgttaccatctctttatctgagcatggagacaggccctttctgtaacttttctggctaaataacttttcttcagaaggcaactcatgtttgaaattagacttgaccttgtttcatgagtttccaaaacttatgattcaggtccacattggctgcttttgaattggatctatttagatgtcaacatgtacagcacaagtacaatgaattcagtgtctgtcctgttcttcgtggtcaggatttttgtgtttgttttattccctgttaagcaaggggttttctttctttcttttttttttttttttttttttatttctctgagacggaatctcgttctgtcgcccaggctggagtgcagtgatgcgatcttggctcactgcaagctccgcctcccaggttcacgccattctcctgcctcagcctcccgactaggtggggctacaggtgcctgccaccacgcccggctaattttttgtatttttagtagagatggggtttcaccgtgttagccaggctggtctcaatctcctgacctcgtgatccccccgcctcggcctcccaaagtgctgggattacaggcgtgagccaccacgcccggcagcaaggggttttcaatacaggctgtctgatgactaacgagagggaacataaggaccctatggtctgcccttctaggctgttctcaggccctaccccacccaggcctctgctctccctcttcttaaaatcttcatggatccccaaggcagctgccctagctgccttgtgtgtgtctacaatgatagagctatcagcactgccatttcctggcccgtgtggtatgagaatatgagtagccaataatgctgtcacagcctgggaaagagacggcaaaggrgaagaggcagccgcttgagaccacggagccacagccgcccattcccagcagagctcggagaccacagtgacacacctgcccattcccagcrgagcttggtgccattctcaggtctcccaagctgaccccaggtgtccgtgcttttatgggttaataccaccagggtattgaagtagattttgacaatcaaaaaaaaaatgtatatccgaattccacgtatggtggcaagtctatgggccatcaaattaggagttattatctatctatctatctgagacaaagttttcctctgtcacccaggctggagtgcagtggcgtgatcttggctcactgcaaccttcgcctcccgggttcaagtgattctcgtccttcagcctccagaatagctgggattataggcatgtgccaccacgcccagctagtttttgtatttttggtagagacagggcctcgccatgttggccaggcttgttttgagttcctggcctcaagtgatccgcctgcctcagcctcccaaagtgctgggattccaggcatgagccactgtgtcccgccagattggaagttattatacccactttataaagtggcgaggatggcatgttttgattcaattcaaaaggtatttaccaagtacctccgtattcaagggaggggatgtggaagcaacctatatacaaacttaaaacctgcaaaggcatcagcaaagagcatctcacatcagcttctctgttcacttggtccctacttgtcttcacagaaagaacagttcttgtgtggtaatcaaaatggtatttctttgagaaaaaagatgcccctgataagaaagacaacaaatackttgatgtggaaacagcctccaacatgaagtaagatttccaactgatcagatccttaatttagatgtcaagtgagaggttgactatttgtagggctctgtggattccagactcccactcagacctactgaattagggtccttaggggtggggccaggaaatatgaaatgtttaaaactcctgtattaggcagttctcgcgttgccataaatacctgagactgagtaatttataaagaaaagagatttaattggctcatgattctgcaggctttacaggaagcctgctggcatctgctcggctcctagggaggcctcaggaagtttctgatcatggaggaaggtgaagggggaacaggcacatcacatggtgaaagcaggagcaagggagagagagttggggggaggtgccacacgttttgaaagaccagatctcctgtgcacttagagtgaaagccgacttatcaccaaagaatggtccaagccattcatgaagcatctgccttcatgatccaaacaccttccactaggccccacctccaggactggagatgacatttcaacatgagatttgggcagggacatatatttaaaccatatcaactctctaagtgattttcatacagcgctgggcttggacatctcaaggtagtggattagtacttagtcttgggcatcagacaaacttaggtacctgtttgagcctggataggtaacttaacctctcagcctgtttcctaatctataaaatgtagctaatcatatgaacctcggaggttgatggtgtgacgtaagtgagatgacatgtgccaagctcccgactcgcaatgttctgtctgcagctgtatccgcaatgggcatgaatgggcagatgatttgcccaaggcgtgtgaacattaaacagtcagctgttgatgaggaaggcatggctcgggacagtgccagctaagatacatctagaaccccattttccatcagtgcatttcctcctgtgacataagctgtgcctcttgtgtgctaggctcccagcccaaggttaggggctttggggaagcttaactgtgaggtcctcatctaggagcgtctttccactgccgtctaagctgtgtgtgtcagctgggttcaaagagttaaaaatatctggttagtaatcagctgtgcaaaagcaacacttttcattcttaagttctgttcttcagtgtgttgagatttttccgctcatttgtttccatgggtctcacaagcatggccttgagcagcagttctcagactttttgacctcgggacctctttgcacccaaaaattattgaggaccccaatgagcttttgtttgatatttaccagattaaaaattaaaactgagaaattaaaaaaacccgaacacacattcattccatcagccatcgagtgttgatgtcatcacactccgtgtagcttccagaaaacttcacctgcacccatgagagaataagagtgaacagggaaatatatcttagcatgatgataagaataattttgaccttgtggatcctggaaaagattctggagttccccgggggcctctgagccgcacggaactgctgatcttgattgcacaggttacccaaccctgttcrtctgcctcacagagaagcacagaagtcaaatctgaggccgttgtatcactgagcagcacagctggggcagggtcttagggaaggcctccgagtccagcgcagttccctggccttacagacgaggaacctgagccccaaagaggtaaagcaatgctcccaagctcacacagcgtgggtgccaagctcagttaataacccagagcttctgcccagtgggcttgcccctgcatcccagttgagtgacttagggaccaggctccggtgaaagacagcttggttccaatcccagctctgccactgtgtgacttcgggcaagtgtcttaacttctctggcctgagcgttctcatacataaaatgtgaataataaaaaatagctgcttcataggcttgctgggaaaattaaatgagataacgtgtggaaaggaactggcatcttgcataagcattacacacacacacacacacacacacacacacacacattttagcttcccagctaattcttagagggatacatttgtaatattttagcagtcactacttctagaaatcatgaccagcttttctccatctcttggtctcaattgttccttttcccagcaaccttcaggcttgctcagcagcatcgcaggggaaagggattccagaatccatggtgagaacaccgtctctatctgccttcacaacagactgaaggcagagctaagatcggatgtaattagtttacatgtcagacccaacaatccatgctgtacgtcatgcaggagtgatcagtgttttcagggtggaatgcaatctcataatgaagcggtgaatagtaktattgcagttgaataacctgcagcatgatgtatggtgattagaatttgtttctggcatatggttttctttttcttgtttttcccccaaagtggaatgtctgcttctgtagcaccgtccatttgcaaactgcgttccccaaccactctttaattgtctcctacatcagttcatgggagagcttagtgaggktaggtaacccagtgctccttattcaacaaatgtaaatgtagcgctttacatttgtaaagggtgctggggggtccctggtgacctgcacacacaagtcaatagatttctgctgaaaaaattttaatattaaaacatcatacataaatttgaagacttcatatgcaaacagcaacaaaaccaaaaaataacaaaggacagagattttaaaataatctcttataaataactagttttatctacccaamcaaakaaaataatcagcactccgtatgctacctcagatcctgttcagacatatgtgggtatcaataatgaatgaatcaattgattcatcctcagtcttgctgagtgtctttctgggagataccacttgtggctcttgtttacccaaagatcactttgaagatagaacattctrtagtcccagatagcatcttcttgcctggaactgacataagatccatatctctaagccacaggactggagcttctccctcttgctaaggaagttgcatgtatcacccaaaagatactggctttgaggtgagaagacctggattctcatatcgtcctttgtactaacagcagtgtgatcgaggcaagtgccttgactctctggtcttccttcaccccatctgtacggtgatctctcagcagctgttcacctctaatggtggactatagagtggtggctgaatccctccaccatcaggcaatcaaagccagccatttccaccgaggcaggtggatcacaaggtcaggagttgaagaccagcctggccaagatggtgaaaccccgtctctactaaaaatacaaaaattagacaggcgtggtggtgggctcctgaagtcccagctactggggaggctgaggcaggagaatcgcttgaacctgggaggyggagattgcatcaatccragattgcgccactgacactccagcctgggtgacagagggagactccgtctcaaaaaaaaaaaaaaaaaaaaaaaraaagccagccatttccaatggccttgacataaggattatgttgcattaagtaaggatcattaaggatctgaatgagctaactaccatgagtttgaatgaatctagagcttgatctcaggtttgcatgtcagggatagcttcgttcaccaacacattctccattactgtgtgaggtggtgtacaagacctcaggttcactcttgggcctgggaatgactacagtggacatatttattcttccttagtgtgtcaggtgtctatcacagcataacaaactaccccaatcatggtggtttaagacaaaaataattgttcttgtgattctgtgggttggctgcattgttctgtcgattttgcctggactcattcatgggacagcattcggtttggcgggtcacctggaggcagggctcagttgggaagatggggctgtctggatctctctctctttccatggtctttccccctcaaggttagcctggcctgggttggctctagagatggtgacgccatgctgaaccccaattccaagagcttatcaagcctctgcttcctatgctgatgttccttggctaaaacaagtcatatgttcaagcccaaagttaatgtgaggatggggactgcccctcttagtgtagataccaggaggtgtgatttgtcgaggctgttagtgtaatggtcttcccaccttagcctcagtttccatgtcggttagatgggaataggttactaagcatgtaaggagggccagcctgagtttgaggtattttccatgtcacatccatttctaactgagtgtgtgatcataggattcacattcctcatgaatgaagaagtcttgtaccaagcgatccaagggtccaccattatcaccacctgacttcagcacacacatacacagacacacacttctgtttcatcttccacacaatgtaaaaatcaaatatgattggaagaatcttcaaagtggtagaggactataccaatgggatatattattacaaataataattatgaagaattctaatgtattttccaaaaacttatgagatgctaaacatctctgttacatattgcacatttaaaaataattacattatgagaagtgcgttattcgggtttctgtttcttttctggtgttttaagctcactctaaaaaggcctggcaaatcaagatgtgtttgcatgaaactaaaggcactaggaggagactaaaaggtcaaatctaccttttaggwgcagcctgcattccaaatggaggcatttcagcttactcaagtctttatttagtctaaccacttggcaacctactttatttagtttaatctcctggcaacctactctaaccacttggaaacctacagcctacmtacagaatcatagttcagccatccattcctaccttcctagtgtttttgtttatttgcttggctcattgtattgtgtttatgtgtacatgtttgtgagggcagctcaactgtgacctcttgtgcagtgttccaaatttacaaagttccctaaggataccaggccatccctggccctcttttctcttatatatgggcaaaggctgagtgacttggggtcctgacctcagtaaatgcagtcttatcctcacccattgctttgcttattcactgaacctagtcctgaaaatatgggagtatagattcagaatcagctctcacctctgtgtggatgactttgcgctcagcatgcatttcatagccctgctcatggcttataaggtcctctctaacatggctgctggttccccactctcctaagtgtaaacaccctcccccactctagggactgtgcatcccatcctgcatccactgcaccctagccttcataactcacatgctgatatggaaataaacgaagaccaccaaatggaaacaagcaaagcctcttgaatcagagcttgctacatccagagggccagccactagcccttgcgttcggcagagactgaaaggcaagcggaagagagaaagctccagagtggaaaagagggaaagcttcaagtatgtcctgattggaggctgttggcctggggaagttgcagacaggctaacaagatgcggggaatcttgtgtaatagattaggggtacctatttagctttcttgggttagtcctagaatttcaagccaggacaaaagttagggaaactgtcagggaaattaatcaagtccttgccatttggggctgattgctaaaggggttgttgtttggcttcctgaactggtgactctaaacagtaggttggctycctgggctggttgctgcaggttgtgggtgaaggttctgtttttatatagtcagactagtgtccatttgtatcttcagcctctcaccattcccccaactgaaggtgctgctgttacttgttccctgtcctcacagaccctctttccacaccccatcattctggctgaagccccctycaatgtgttttcacagcacctgcactttgatcacaacacatgtcccctttattttagtcattactrgttcgttttcccttttggtccaaacactccttgagggcaggggttctgtcttgttcatcactgtatcttccctagtcccttgcaccgtgtctggctccagtcagcttatagtaaataccgattaaacaaatgattgatgaataccaaatacagcctgataaatctccctctttccactccctggtctgcatttctccctgccttacggatatctgcaactggatattccacttgcatctcaaaattatcatgtctaaaaccaaacatttgatctttctcccaagccattccttcttgtgatgtcctgatttgtaaagtcccaccatgctcacaaacactctgccttgccccctgcagctatcagtgggtccccatcatcttcatctcttgcatttctgtcccatttctttttattcccacctcagcctttgttctggtttggactctgacctcagcctgccgcctggtcactgggttccagtctcagtcaccctctcgaatccatcctccacgccatcccaaagttccactttgcttatgcttctgtcttatgggaaacccttctgtggcctcgcatgtctcagcctagccttcagagctctcaaccgtatgaaataatcccgtccatagtgttcattactccttgccacacacttgacttttcaatcccgttaccctagttgtttctaggacatggcagttcctcccctcctttctgctgcctttaccacctccgcagcttaaacaatgactgaacattcccttgtctccagtggcagttatagatactacgctgtgctgtagtgatcgatgcagatgtcttctttcccttactgaactaagctcattgaaacatccaccctagctggtctttgccatttatagagtaggcacatggtaaatatctgttgagtaaatgaatgatgcagctggtcattgcatctagaataaccctcacgttaaggtgggttcatccttagatggatttgggattgatgaattcaaacgtgcagttaagagtttgcttgtaaatcctgagaccatatagacagagtagcagcataattgtgtgtctgaaccatcagtgtttactcagcccttccttttgtagttctagtaaattgctttgtatttgaatccgtgctagggccttctccgcggagatttttttttcttgaggcctacaccrgcagcatggccaaatgcctatttcccaacttatatccagaaattattgcctttttttttttttttttttttttttggacagagtcttgctcttgctctgtcgcccaggctggagagtgcagtggcgtgatctcggctcactgcaacctctgcctcctgtgttcaagcagttctcctgcctcagccttccaagtagccgggactacaagcgtgcgccaccrtgcccggctaatttttgtatttttagtagagacggggtttcaccgtgttggccaggatggtcttgatctcttgacctcgtgatccgcctgcctcggcctcccaaagtgctgggattacaggtgtgagccaccatgcctggccctggcttttctttagtagaagttcagttcatactaccaaggcatctaaaatatttatctccttactcattaaaactcggcagttacacgtcatactggaaagagggataggttggcagaattggggatcaacaggtatctgggatctgcagggtcttggcaggagaaggcttgggggggacaaggcacatgagtgtgcataacgatctcatagaccagcatggtgggaaagagggaaacagcctccctgttgctcacgagatctaaaaaagcctgccagcttggtattttggtccctggatttatgtatctgatgaagataaaacattcagagcatgccagccccgtgtagaacaccagcctaagagaatggaataaaaagaatgccgacaaaatttgaataatcatatgcgatacatctattcattctaaaacatgattagataatgcaaattatacatgataatcataaattaaaacaattacaaataagacagaatacatttattgtttaaattgttgaagtttatatttagaaattgctctgggtagcatcaacattgactctgctggaggattcacctttgctgtcatagatgcaaaccaaccatttcaaacagttttaatggcaatctgtgcttccaatgcagtgaactgggtttctgctccgccgtgctcttccccattctctgtggttttatcatcctcggcctgcacacgtaccgttgcctttgcctagaatatcttttccttttttgtttattcttcagggtttaatgaaaaccctgactcttctgtgaggccaccccacttccctttggtattgcttttctcctctgcttccgcatggcatcttgcacatttgctaacgtgcactcatgaccttgaacatcccttgagcacaggtctctgttcccctctgggagcctcccctggctcatgcctcaatgatgaggaagaccctgtctgagttgcttttgtggccttcgtcccctctgtgcctagtacggggcctggcgctcctcgattggaaagcaagaaatatttatttaatgaaatgtcactaacacaagctgaggctcttttaggtctaagaaaacggccatctccccgttgctgttttggcccctctagtcctgtgtccttgatgtctgtgaacggccactcctgagttctgtctgtgaggctcactgctgctagcatgttggagcccaagggcattgaggggccttcccctgtcacccccttttgttacagacacacattccagagaggtgaaccctcgctraaggttacagtttgccttccagctaccgctgaagcttgtggcttggttaaacaggcctccctgagtagaaatgatggactcttctgagttgagagacctcggattgtacttgaaactttccattctccagctgggccatttggggcacttcctgttcttgtgtgaaatcattagccacaatctggagacctacgagtggaatttggtctgcagtcttcgtttctttctttaaagtttgaattctgatgcttctcacaaagacacctgctttgcagatagctctggtccccaccgtccatccccgcagttactgcatctttgagaaactttctgttttatactcacagcgcttcacagcttgcactagccatgttccaagtcttcggccgctgcatgcagccagcagttagagtgcgggactggacagcgccggccggatgcttctgccttcgctcattgacggttcttgctggcttccgaaggcatttagatctgacactgtggatgaaaaggccctataaagcccttcctactctgacatccagtgaatctactattaagatggattttagagttaagtgagtccaggacgaccatcgatgtctcaccgaattggaactcactggtcagcagccgtaatgtttgaattggaaccagaaaatagctctcaaatttgcagagtcagctttgccgggcttcaggctgagtgggctcatagctggttggccctgtatctctggcctgggcaccgtggctccttgccaaggccggcaacccttgatggtggcagcacggagcagaccgagcccccagccgacttacccccgaggcctcgcgcctcccccttcacagcattgcrccttccctcttccagttcccagggtcgcttcaggctgtcccagccctctgcctagtcagctgtcagggaggggaagtggcaagtccaaggccgccagagggcttcctactgcctgccctgcctgtggcatttcttaaggtgacaaagagtgtgtttttaaaccaccctccagaactcttactccccatgaattctctgcagctgctcccccagaattgactggaaagagaacctcgtttaagctgcctatgcagcagaatgctgtgagtcagacgacgtcctgccaagtgcaacctgagatgcttcagtggaagcttgttcctcggtggtgacaccttgtctccacgctcatccattcgagtgaaaattcatctctttccctcccaaaaacatcatgtaatgaatgwtggttgtttttgctctgaaggagactttttttttttttttttttttttttttttagacggagtctcgctctgttgccgggctggaatgcagtggcgtgatcttggctcactgcaacctctgcctcttgggttcaagcgattctcctgctccagcctcccaggcatctgggaccacaggcatgcgccaccacgcctagctaatttttgtatttttggtagagatggggtttcaccatgttgaccaggatggtctcggtctcttgacctcatgatccacccgcttcagcctcccaaagtgctgggattataggcgtgagccactgtgcccggccgaaagtgacttatatttgcatagattatctctgtaaaaagtgaaaggtttctgtgaacgtctggtacttataaaatatctttgtagggcaggatgggagatgattaaactacttcctcatttagacagtgccacctgtaagaagacttgtggtgtggattcaaagatggttatccacagtgagatgaatagaaggcagtacttctcaaactttcatgttcaccgaagtcacctggggatcttggtaaaatgcagattcggatacagcaggtctggatgaacccagactgcttttcctaataaactcccagaagaggcgcaggttttaaggctatgaggtgcttctctggaccctggctgtccgacggccacatttaatgagaagagaacccagctgtgtggttgttgactgcgatgaggatcgcactgacttagaaagttatgactttaatgttccttagtcgaatcactaagatttctatataaaacagcagaaaatatgggagtttggagaagagagaaatgagctggatgaaatagcttcctagctcctgattgatcattgggcatcagctattttgtgtgctggtgccgatgagcaggggaacacgtcgtgaacagagttgtgtcatagctggacgagaaggagatgttgtagggttcagttcgtgtagtgaatttttcctgaatccttaaattctcatatataaaaacatatagatatgaagacattacaataatatagaaaagactgtgtatgtatgtgtgtatgtgtaccctatgagaaatgtttttgctggtatgcgaaggggaaaatctagtgtttggaaagagttctccactgtgctttgggactacaagttcagcttggggcagggcagcagagttgaagaggaggcagggagggcagaatgaagccatcgtccctgtgcagcatatcgggtgttacttttatgttggtgaaagaatgatccgaggagccagcttatcagtgtggagaagattgcagctgcaatttgctggttagtctctgttcttttaacgctttcctgaagtgccattttgtctcggtaaaatgctccctgaaaatactcaaatatttttagttgtagagtacaaatcagattgagctgcacatttccctggtgagcaaaagtgatgagtttgtgttcattaactcgaggccatctggtgcagacacgctgccgtctgtgaatcaaacgtgcatcaaactccagggatcagaacgcgtgccagagccagtgttttggagagtcaacaacaaccgggggagaaagaggccctggctatatttttcttttaaaaaatcggctctgtcttgcaacatatcagagcatcccgtgctgcccagctgatgagcccacttgcaatctctccattgcccatctgaactgtctttgcggtgtgctctgaactgtttttgaggtgtgtctctgtggttgaagtcatcttgcctgataccatcttcgtttgggtagggggagaggtggagagagcattccagtccctttctctgcatttttctgtaaccacaggcctgagccacagacaggcgtgtgcacacacacacattctcactgtgagacaaagaattgtgaggcaaagcaatgctcaaggtagttgacatgttgcagaacattcttgggagaactgccttctgcaaataaccaatttcttgaggagacagtgcttcttgcagtcttgccaataaaaagccactcagcagcagctagctttctgtttagcgcactcacccaaaatatatatacatgaaagaaattgctacgctgatctggtactgaagaccaccagggccgtccgtggcgtgtacggaggagggacctgggagggtctgggagtctccttggaggttcctcccacttcggcatccgtgagtcctgtatttggtaccggaggcccggaggcccgtgtatctgtgttagcagttggtcccctgcagagcacgacacctgacgtttctrtaacgagatgcaattttctgggtagcctctgtaccktctttctagctatgccttttcctttaggtacccaagcatgttcactggaagaagagaacacagactgggctgcagayggagggaagatgagtatagggactctccttgtctgtccctgtacctgcccactgccacctgtctacgtcctgagatacccagcagaggacagggttccacttggaaaattcttttgaatctcacacaagacagtaataaacatagagggagaaataacaagacattttaccatgtcttgtgtcatgtaggaaactttacatttcagaaaatatgaagacaaaaagatgaaggaaagggctttaaggatacaaaggaccttattatggaaggaaagcagtgttgtcaagagagctaaaatgaacttttctttttccagtgggttaacttttaaaagtgcatgttatttagtgccctgcattgcagtgtatcttattataaccttaccagccccagctccttcactgttttcagtgtttgctaatatggtaatcatgaaatagcactttatttttgaatctttggttagcattagagtttaagtttatcatttgctttttgtttgtaagccctgaatgaaggtttacttgcacttaggaaagcccactgtccagtatgtagacaagttagctcactgaaggtcttactaagccattagttgaattacaatgcatttgctacagcctggatctctaaattgatggaatccacattgttggcaagattcaagggtagcacacaccctgaacacacaaatgcgaggacacaacagcaagaatgagtaagcgagagaatcaggtgagtttctaaggagctttctggaggaacagaactttgttttactttttgattatgcaatttatgtttatagtggaaaacaggtaagacaataatagtacctttgctaatcatattttaaaacattttggtatgtatgcttctattcctttctctatgggaataaataccttaaacaatagaatcagtatattcgtgaaatatcggtcagtaaaatcagattagaatgattacaaatgcatcggtgaaggtattatcagtgaaaatatttgtaacctgcattttcgctgcatattcatttcatgaatatcttttcataccagttatgtaatatgtgtgtgtgtgtgtgtgtatatatatatatatatatatatatataccagttatataataaaatgttattttattgttatcactatgtagtctcattgaatggatataccatagcttatttaacggctttagtgttgtttgacatttgggttgcttccaacatttcctgctcataaatgctgccgtgatgagcatacttacagctgaatcttttcttgcatccatggttagttccctagaataagttcccagaagaggaatggctacatatatgcatgtgcaaactttatggcttttgatttgtgtcagtagcataatgtattttcttcactggcatttagcatacttttaacctgtggtagcccataactctttactgtgtcagggccgggttccgtgcacctcctttatcagcctacaacactacgatgcccccagcctttccagtgccgcctcttcctgcccagcccagttcctggcccagaggccatggcagtttgcatggaagtgctgagtattgtttcatgtttgcaaagagaggacagctgtggatgaatggagaggaaataggagaaagtcattgtcagagactcgggatttttgatggaagctttatcgccgatagatatgacatttgccgagtaggccatcacttctttgattgtcactttccaaaccaaagcaaatgaagtcatcaaaaagaacgatgtgtcggagggcatttcaaaattctggagatttctgagacacgtgtaaggaacagaaaacctggcttgggtggcatgctgtgtcaaaggaaaagaactgcagtgaggttggaggagtgggctcacctgatggatgcatttcttcagtacatacatggcaggggaaggcctgtccctctgtggggtcaggcagtcagggtggctcttttaaagtggtagcttctgaatgtcctggctgctgggatcctagtagctttcctgggtgcccttggaaagcagaggattggtggtggtcctgggtgagggtctgcagatgcaggtggtggccaggggtctagccaggaagatatgccatatcagggaggcccagccctcaggggactgaggtttagagtggagacttggagattccttggaggtctagagataaggagtgactttgttccataggcaccgggctcctggagtctgagccataggaaactggtattcagtactagagctaggattgargaaggggtctgttcacaaggaattcagtagcagcccaggtcctacgtggtaccacagtcagagtggaaccagcagcccagactgctgtgccatcgacctgaaggcccttcatgtatctggggagctgggactaagtggtctgtgctgtgagggttgggcagccacagcaccaggggtctggacattcactgctggtaacggtagttggcagccttctttcttgtcttttctctagatcaagcttagaacattctatgttgttttccgtatggttactcagtggcacagatcttacaggaaaggcagaccttgaaaaaagtttgttttcttctttttgttgtaaaaaaagacagatacagaaagcaatattaagcaaatgtgtggctttgtgattttatgtaagccaaacaaccttgttactgcataactttgctagtccccctaagagcctctcctccatctgccccaccccagttacagctttacagctcctcacccttcccaattcttgtaacagccacttccatgcatttctttacggatttgtcacccaggtgtgtgctgtggactgaatgctatgtcccactcaaattcctttgttgaaattttcacccacaaggtgatgggattagtaggtgatgatgatgacctttgaaaggtgatttggttgtgagagtggagccctgataaataggatgagtgccgttgtaaagagaccctttgcccattctgctgtgtgaggacactgtaagaaaggaggcagtccctcaccagacatagaatctaccttgattctggacttcctagcctccagaactgtgagaaataaattcgtgttgttcataagccacccagtccatggtatgttgttacggcagcccgaacagatcaacacagcgtgcacgttccttgctgctgtttttgagccttgcccattaaaaaaaaaaaaaaaaaaaaaaatatgtgtctttgaagtctcctttaaaacacgcagcttgccctctcttccttcttttttcctgtgggtttttaatctgcagatccccataagctggcatgcttcagcagttcctctgtcttttgtatttcctgaacattggcagctgcatccagaggtgtggaccagacccaagtctatctctttaacaaagtagtgatgcttttcatcggcaaacctacaccatgtggtttttgctccttttcacgttaacagccaatgatgcttaaggcacaaatccattgctttactgagagttgcaaaatcgtattatttcaactctatgaatttgttttcatttattaattgggataattttctaaraaggagcttccatgtcattttccatttgggtactcagtggcacaggtcttacaggaaagtcagaataaatgcttaatgctttctctcgacccacttttcagacattgacttggtttcctgtcttccttaagactgaaccaattaggtcgttttcaataatattatgaactcatggatttacacacatttgatgggtttcagtccattgcaattactatctttattgaaactcttattttcctatctttgaccagcyggagctccttcacattggctctggggtccttttaccatgacttcaggagctttcctatcttctttaccatctggtataggctcacgttgtctatttcctgccccagacctggattccaccatttctccaagaaatctgctttcttttaatcagaaaaaagtatttcaagaccagctggggcagcatggatgcttattgctattggtttggtcattatttctagttttttcagtggacacaccatacaatgtgtagtgcgtatgttggggagggaggggtgttatcaaatactgtgagttcaaactgatatttcagactcaaattcagaactgtatagttttcactcaactacttttatattgcatttgtatctcctttcttccaaaccaagaatcttggtacttttttttgaaatggagttttactcttgttgtccaggctagagtgcagtggtgctatcttggctcactgcaacctctgcttcctgggtccaagcaattctcttgcctcagtctcctgagtagctgggattacaggtgtgcaccaccatgcccagctaatttttgtattattatcattagtggagacggggtttcaccatgttggccaggctggtctcaaattcytgcccccgggtgatctgtccaccttggcctcccaaagtgctgggattgcaggtgtgagccaccatgcctggcgatgtgagccaccactcctggcaaatcttggttcttaaagatacagaattagaatatcccgtaattattacaatagtcccaataacaataataagagcgctataccatcagtgatgattactgaaaacagttaaacattttttaatccctctatttttttgtttccccccaatttttgtgggtatgtcatatttgcattatcagatcatataacctaggggtccccaacccccggttttggcctatggcctgttaggaacctggttgcacagaaggaggtgagctggcattaccacctcagttccgcatcatgtcagattaggggcagcaaaagaatacattttatttttttttttttttttttttttttttatttttgagacggagtctcgttctgtcgcccaggctggagtgcagtggcgggatctcggctcattgcaagttccgcctcccgggttcacgccattctcctgcctcagcctcccaagtagctgggactacaggcgcccgccactacgcccggctaattttttgtatttttagtagagacggggtttcaccgttttagccgggatggtctcgatctcctgacctcgtgatccgcccgcctcggcctcccaaagtgctgggattacaggcgtgagccaccagcattagattcttataggagcaggaaccctattgtgaactgcacgtgtgagggatctaggttgtacactccttatgagaatataactgacgcctgatgatctgaagtgaaacagtttgatcccaaaaacattcccttatccccccatcccgatccccaccccaggtctatggaaaaattgtccatggattgatagtgtgaagcatgtgatgtgctttttcaacgtgtagttttgatttcttttaatttcagggaagttgtcttcagttatgtactttaacagtgttctgtccccttgacttgcttttctttatcaggagcagactcctcttctccattgattggatcttctttgcccatcctcagtatttgtctctttctctgagttccttcttaccttttttcttttcttcttgattttaaaaaaagataccttttgcacctcccatttcctttacacagcttttgttttatatactggtttttatgttccttctagtttagttttcatctctgacattatgttttaatattatttcaggtcttatatcactttttaaaggcctttagttcattttaaagtaatatgctgcatattttatagttttttggtccatctttttggcatgcattcattatctgtagggattttcctctccttctccacctcctcctcttcctccttctcctcctcttcgttttctttctaatccttcttcagctttgtatgaaatttgaccagagtatttactgccacagagaggctccttcttttcactccttccactgctgccaccaagcttttgtcccccaagaggaggatggtctcagatggaggatggtctcagatggaggacgatctcagatggaggatggtctcagatggaggacggtctcagacagaggcccttttgcaaagtttgccttttctcgtgaacagtggtcttgagtttgagggaggaggagtaggtcatgtggactttctaaccttacagcactgttccatcttctgttgcatcccacagtgttaaaactgtgcagctggccctctgagatgtcctgtttctgttcccctcctccacttttacctggccaacctccttcctttatctctgttatttctatctgctcaattttgattccactcccagcagtgaggccctggacatgttcattgagagtccctggggacagtgcagctccagcctcttcacccaggcctcgtaacacaggcccttgcgtgtgctgctgctgctggagtgagccaagctgcttgagtgagccaagctgctctcagtgttagccactgttgtcaaaatggctgtctgtgtcttccagggaatgcttgttggatattttggtgttttgtgcccaggtccaccagatgccctattgcttccctctgttttctctagcagagatgcccccttcctcaaaaaagaacaaaaaacaaacaaaaaacatgccttgtggttgttggtggtttcattcatggacttgtaatttggagttcttggggataccttgtcacctagttttgttgtaaatgttgtctgtgagttgttgcttatgcatttagtgcatctgtgtgatttttctgggagacattggaaggatctcattgtagctgccatcatcccagagccccccagcaagattttaagctgatgggagacagggccccttgccgaacgtctgacggcacttcacatattgttctgtgtgcaacatggattcgataaatgtttgtagcatacacgaaactgtctaactctgggtttgaactccagccccaaagcaggcacaattctgggcttttggtattacatcctttttgcagtttatttggaagatattcatttgggcgacagggatgtactgtctgggtcagatctgggaggagtccaccctctagtgggggagagtggctctctgctgcctgtgtatggagataatgagtttcaaatgtggaactggctttggagttcatgcctgccactccaaaaaggcaagaccagagtggaacatacttgggcaagcctgtgactcccagtacctttatctcttaaagggatttatacagcagtcacttgtctgcttctttgcctaggtccctaattaaagcagttttcaacccgataaacagcctcaccttggctgatagagttggacaactccttggtggcccgtttccatgccctctcaggctctgtagctccagggttaagttcctgccttcagcagggccacccactgaaacatttaatgaggagaggagtattgtttcttggagacataattaccagagacacttaatgccacctttcccaagataacaggccttttgaaatgcagtgtgttggggaagatttagccaagctcagtgactgccttagcagttatgagtcatattaataatgcctacatctgcctccaccaaaaggctctagggtctgtctccgaagtttattaaactcttccttgggagacttgtgcttgggacttagggttctaagtcttttctttcattatttttggctgtaactcacttttacgtggttgtggcsctgggcaaaattttgaaataggtaacttccctttgcattctcccagtactataagactcatacgtcctgggttttaggggtgcaagccagtccttgcattttaccaggattcttgaaggctgcaaactcgggatgtaaacacaagccattactgggagagcatacttgagacattggaggcctcttaagatgcttgccttctcaggagctcctgtctcccaaaaacacaacacaacaaagcaaaacacagaaagcacttctaatgaaagacttttatttaaatgtaaggaggcacctacttaaagtaactcttaagaaaatcacttaataaatatatatgacttttgtaatgtaaaaaatgtcttcctaacttatttgttttaaaatttcaactttttgacatcgtactgtcatcctttaaagttttgtgggttttcttagttttgaactttttcttccttaccgttgtcttccccctcatttcctggaaagggaaatcgtttccttctcatgatctgcgaggcttccttccctcctctctcttgtcgttgtttcattttgttttcgtcttttggccccaaggaagcagacgaagaatcctggagtgagagagacccgggttcccattccaactttcccctcacttgctgtgagactttggcaagttcgttggcttgtctgagcctcagttttcctccttgtaaaatggatataaaaatctctgcaccactgagttgcagcagtattaatgtcatactttatacagcatgcctagtgcctgccccagtgcagatgctcaggaaatatcgtccttacttaggagcactcctgtcaatgaaaacaggacctcttgccaaagagaaatattttgtgattagtgcttgctcctgtccctgcccccatgagcaagtgtcctccctttctcctcctgcattgttgaggacacgtttcttgatacaaatttaactacagccactaaatcagaaattcccacccaaagtcataccataagcaaaaaaaaaaaaaaaaaaaaaagtgggcttgtatatttaaggctgtgggtggtggaactgggcatgggaggggaggccactgagacatctctttgctccatcccctttctgagtttcctaggcytccactgttttctctccaagcagtccccctagagtccagggtccacagggagacccgttgtccctgctcccccaccaatttctcccaagagaaaggaggtstcagatgaggacccttttgcaaattgttgctctggaggctgaaaaatcaagctcgagctgcctgctggtcctgatttccttcctggccgttagtccctgcctttttcctctttgtcggttttcaaacgcaactgcccgcgccaccgggagctgcccctgacttcctccttccctcctggccccagctctcctgctcttgttcctgcccctgcctccmtccctaatacactcaactgcttaaatgtcatttgtgaaacaacagaaggacgtgctgtttttgcagcatcttggggaacaatttttttgattcatttggtgttaagaacactcataagaaatgtattcagtgaccctcgccagcctcagtcactggtgtggttcccatttggtggttggtgagcaaaacattttccccccagaaatgtccactcttctagcactttcagcctttctccgtaggttcctttgtcttcaggtccttgggtacttgaagccctgcagttgctagttcattttccagctgggagagcgatcctgatccagctccttctcaggcctttgaaccaagttctttggcaactggccagggagggaatatggccatgtcaggcgtgcttttccggcccatgagataaaaggaatggctggaaacactattccttccgtgactcacagggccaacctggcatgtgcaaggaacccgtcagactgggtggggacctcccgtccaaatttacctgcgcagacacagcacctcttggaggagctaggaagtgggagttcccttagcacgtgatccatatcttccctccaggccctaccgtgcctgtcttgtagcatgacgatgtatattctcaccttagtagtccccttagcctgtaaagctctttagggcaggatctacatctgcgtaaccttcagggcccccagtgctgagaactgtgcctcacaggtcctaaatgtttactgaaaggaagaacacacaggggtgggaggatcacttgaacccaggagtttgagaccaacctgggcaaccaagcaagatgcagtcaccacacacacacacacacacacacacacacacacacacacacacacacacacacactagctggttgttgtggtgcgcacccacctgtagtcccagctactcaggaggctgaggtgggaggatgacttgagtctgggaggttgaggctgcagtgagcttgatggcaccactgcagtccagcctgggctacaaagtaagaccctgtaacaacaaaacaacaaaacaaaaaacaaaagaagaacacatgtatttacctaactgagggtgggagtaggggtcagagagaactgtttcctttctctagaccttaccctgttctctgccagagaaaacggtccacacacacttaaacgattatttaaaaacctagagaccctttgctcattactcaaggtccagatgagcaattatgctatgaattagaattggaattagctgcttgttctggccagaacacctgattgcaatatagtaactgaattgtccctgcccgtatgagttattcagtcatttcggactgtggtgctttggatttggttagactgtcatccatgaacacccagatagaattgttgctgttttgcagaatcatcaacacaggctcctggggcgtcaaaggtgtcacagcaccctgactgcaagagtagattgggagatgctgttgtgtctcgaaatcatccttggcgaatctccatcacacttggccattttatcttcctgttcactttcagtgcccaaggaagagaattgtgggaccaatagcaaaaccttccccacttgccttccagccatggtgagaatttggaggaaatgaaaaatagcctaattctcatacaccaaaaaatatcaagagttcctgttctaatgagttgtttttacattccacttgacaggaggctgacgatttgtggtttgcagtgtgagtgaccttcttgaaaagcattctgtatcttcattgactttgaacagaccttaactgctgggtgaatttgggcacagttcattccctcggcagatgggcgtgccagatatcacgtgtactgtcttgggcctgtaatccaaatgcacagtagatattaccaccctccgactttgttttgggaaatccccggatgtagaaacattggagttgtcaatttcatgtgcgtgggtctttccctaaactgtgaatccttcctccccaaaatatcattcattaattgatcttaaaaatcagctgggagttaggctccttatttaacactgccatttgcacctctcgcttatataacacatttgatattctctttatctgctttgtccccacctttgaatatctcatggaggctgagctttgccaaacagacagataggaagcaaaattagaagcttttctctgtgctgacttctaagggccttcctggttttctgtgaagcaaccaaaaaaaaaaaaaaaaaaaaaagtcgagactggaagaagcaaactttcagctaattatcatcttttttcccctctgagctcagagtactgttcttaatttcctgaccagcttgtacccctcccccgctccctccgagcatctgtggtggtttccaatggagccgcattcctgctgctctgaacttccaacataccataccagttggtttgccaaacagtgaactgccagccatctgccatccaaagtcagaatttacattgtttcatcttaaaataacgcctccggaatagcaagccactctatgcatcaggttttaaaattgacaatcagccagaattaaaagcaaataccaaatgggtataaaaaaagaacgttgttgggggaagggactagcatttgatggagagtttatttttcagcatttttacctgattctccaccaaaatagccatgccatttaattttatctgcaacagcaggaactacttatagactgagaacattaactttttacttgcctgactctagatggaagagcagttgtcccggtttcagggagaagggatcacctcctaatcccagcctatagggaarggagatttgtctttgcctcctctcatcaggcctcctggtgctcaggtgagaaagtgaaggcactcggaggtagaacaccctggccaaggtcacatgctgggtaagggaggaacgatgctgtgaacccaggactcctggctccaggcatctcgttctgctctccatcccttcctacctctgcayacttgccttgactagtcaatggggctgcaggacgaccttcattccccttcagtccttagtgccaagctgagcagccttgcctgcctcattcccctgctccttcaggacagataggcaggaagtgatgtccatctgcaggactggggacacctgggggcctgtgatgtttactggtcttgtggcctgtcgaaagggaagagcagccattttatctggacggctttctagagcagatgggctcggaggagactgattttttgaaagagagaaagagaagaggcttcatgtttcgtttagggaagctgttccaggcaaaggcagcttggggaaaagtgtgaagttatgagtgggcagaggaagcagagggctctgaatttataccaaagacacctgcctacagtttgaaactctgtgccacaggcaagcccgtgtgagctcggaagatgcgagggccccaggctgggcagggcactgcgtggccctgagccaggccttgtgcaggctctctggaattttctttgagccggcagtggggacaatggcaagcattaccctgacagacattccggagtcaaggcatgctgcctgctcagctgggtcttgatgtgagggtcagcgatgggagctgtggtgatcttttggtctggtttggtttttggccagagagtggcatctccctttggaagcgttctctcacccccagcaccatccctgctcccgcatcccctgcttgtacctgtaacagtacctgctacactggccaggcttcgttgctggggacgtctgtccatcctgctagactcctcgtggtcggcggctgtcttaactgatctttttcattctgagcaccattagtatgtgctcagctaatatcatgagtgaatcagtaaattgctgagatgacgtaggacttaactggttgtgctgaccaccagacccaaggctgccagaccacgctgttgcctctgtgaaagccacttgggttgacctgaggtcttgtgatattgttgtgttccggttgggccttataattaagtagtctccccttatccgccgtttcgctttctgtggtttcagttacctgtggtcaggtaactgcagcccaaaaatattgaatggaaaattccagaaataaacaatgcgaacattttaaattgcatgccgttctgagcagcttgatgaaatcacacactgtcccactccatctgtcctgagacctgactcatccctttatctagtggatccacgctgtctacactgcctatctgttagtcacttaaagacatcttggtgatcagatcgacagatcacaagatgggtgagtaagaacaataagatattttgagacagaaagagagaccacagtcacataacttttattacaatatattgtgataattcttctgctttattagtgttgcgataatctcttactgtgcctaatttataaataaaactttaacaggtaggtatgtatacgaaaaaatatagtatatatagggtcccatatcctctgaggttttgagcatccaccgggggtcttggaacatatccctcatggataaggwgggcttccgtattagcaggttatggagaacatcctcgtgtgctagtcactgtacaaggcatgcactgtaggtcttatctcagatcacttaattcagtttattagcaatggccctgtgaagtgatgagccaaccaaggcacagaggtgttgactttccccaygtcacactgcgagtgagtagcagaggcagataggaacttgcaagggctccgatcgcgggcatcccattgctctgtctccggcgctggctggaccccactggtgtgttgtgctcagcactggagctagtctgaagtgccttcacccacagcacacctggaagagggtaactgggatgaggcaggcctcatgaggaaggcgttctagtttgcctgagaagcccaagtgaggggggaaagctgcttttaagactctgctcgtttgtccgtggcagagagggtgtgctcacttactccaggtgacaggaggggacttgtgggtgaagatggcaatggggccaatgctagcccatcaggaagggtttccaagcaagtggagctgccggacggtagaattccctgccccgcgaaggaatgagtgtcctgccacagcagagccaggcacagcagaatgaccatgagtcatgaagccatggaaagaaagggtacctcgctgatccagatcgtgggacaagtgtaccttcacacatccactctgactacaaatttggttcattccatactgtgatgatatatttctgaagcttaaaatacttttaacgcatttttacagagtgagtcattttaaggcctccccctgcccagccttgtaaatctgatcaggagaatccaaatttattttaaaatgaaacaaaacacgaataagatgtgcagataagatggagtgcagcactatcatttgatttgctaaaagatgtcttcctttgcaaaatcagaagatgaaagtgtgactccttccaggggctgtgagtgttgatctgcggaagccctggggccgaggttgctggccataggcagcagaggggccgggaggcgactcatggccaacaccggagtggggtggtcccagtcctggttgcctctagtgaaggaatctctagatgcaagtttaaaaccgtgcctagccctctggccaaatgctgttttcaagatgcactgttccacaatgaaagataaaagctcttttattaaaacaaagcagttgtaaaacagtttgtatctgatcctgagttaaaggcattactaagggaaccacatagggacagagtgaatgtcacttcttccattaagtttcatagtgtttgctgcccgcacatgcttgtacctgtcttgtcacttttcccttctgcctgggagaygggtcagtaaattccaaagggccttttgctaatctaacagccagaaaaccaagcaaaggcttctcccctactgatctccaagagcttagcaagaaaatgaaattcttgtggttctagggcacagctgtgataaccagggaccaacacccgcaagtgtgttgaaacaataggcctgaagtccaaaagctaaaagaataagtgttasaatccaagctcaggattcacaatgagttcgagatgaactctacattcagtttttggagaaaaacagttgtattaagtagtgactgagtatttaaggatgaagtattaagtttcaaaactgttcaatattatattaagtattaaaaactaaagtgaccttttaaatactgttgaattatgcctcctttcatagagttctttaaaaaaaaaaaaaacgaagaagaaattatctgtctcctcagctaagaaataatctattcatccattctagacagcttatttgaacatagcatgatcctggcactactgcccccctaatggttgagtgctttaattgcagacaaagtacccaacgaaatcaaacactgaaatttcaaaaggaaatataattagagcaaacaaaatgccatctacagagactgattttagtaagttactgactgtcacacccagtgaagactttgtcatcttttgacctttagttgtcttttgacttgtggtgcttcatgcattaaaactcccatcagagattaagaaaaggtaatataaaaggaggatagaaatttataatatattaaaatttgattttaggatgaaaacttaaaaatgaggcataggttaaaataattattaatacgggataggtaatgttcattaatagtcattctrtttgtgcatcattgatagcataagaatttatttaacttaattagggccagttaatccaaaaaatactctttaaaaacagtcacagaagcaaaaatacatatgagaattattcatcagttttctaagtttcaaagcactattatataacttatagcagataaaagaggaacaatcattcattcattctcctatgtggttatgagaccatgagttcataactaaccacaagtcaaggttctaacatcaaatccttgatggacacttggcatgcatgttctgttcatattgaagaagaaactagatgctgaatcttcagtagtagtgttgcctttataaacttttgttttgccatcatttttgctttctggtttaataatagccaacatttgtctcgtgttttgcagctgcaaaatgcttccacatgtcattttcattccctcaagcctggttcattagttcctttgttttatggatttggaagccattatgttcaaagaaatgaaatgacttgctcaagatcacataaccaataagtggcaaaggaaggatgtgaacttagattccttccttagcctctttattccatgcttctcccactaccagagtactgcttcctgtgagaagagtggtccctccaaagggcaatccttgttatacatggtggcatagcatacgggcggccagtgaagaaatagcaagttaggcagagaatgacccagtgcctgaggcttccaaggaaacagatttcacacaaactatgaaatctacttgtcctttaatgtaatgttggttgtcatttaatcatttattcatccagcaataattactggcagagcagcagccatatcccttgaactgtgagtacggggagcaaagtcctggtcaccgccttgaggagccaccttttgatgaattgtaaaacacctctccctcgggccaaccactttgctctcctgtacttgccacctccaggccacgttacrtacctggaatatcaggctgtcacagtgaacgacaaggaggaagccctgctttgtcaaagatgccccatggcattcactgaagaggtcctgtgggtcggctcctggctggccatgtggatttgtcctccttccagatgagtcagcttggggatattcatctgagcagataagtgccaatgttgccatggagagaaaaggcgccagcgttttgttctgggacgtgctgtcacacacgctcgtgggcaggtcatgagaagacgtgtctgaagtgtgatccaagtctgcatgccacaattcaaatccaccctctgcaaatgattcttaccctaggcacatccgaatcccctggagatgttttcagaccatgctaacccactgcacccctgccgcaatcccgatgaaggtgcagagctctcagtgtcatgatagatgattagggaaaagcttaattctttagttatttttaggatatgttattttggaacaagatcgagaaggatgtaagtaccaacaggcatttgaaagccagaagggaagtagtgagccatcccggcctctagagatggtgcagttttaagactaggaacacccctatattatgggagaagttgcttcctgagcgcgctctcatgctggacatggggagagtgtcctcagtccccaaacctgtgccggccggcgcctcgttccgtagcttccctgaccccacatagaactcatgcaaggttgacagaagccttctttctagggttcccacactttaggggtgacataattgtttacttctcgttctcaggtttttgcctgcataaaagtaaacagcagcaaagagaaacattctttctagttaggaaggaagaagagacattggtcatcaagcagagacagtgtttggatcccttagcatggcatgcaaggctgtacagttttccagagtcctttccctccacctaccgcctgttagctaccagaagctccttgtttgcctcagtacctctgtgcctgccttctttgtggtcggtggtgttgcagttcctaccatgcaagcataaccacgtctgccttctccgctgtgcctaagaggaaggactgtggcgcatccatctttgtgttcttagactccatgtcttgcaggacttgggacatggttgacttggcaacacttgctgaaggtttgcccaagtttggttctctgactctctgattttgtgggatttccagaagtctttccttacacatgagaaagtgtagggaaggagaagtcttatcatcctacacatgagattgaatgatagatcaaagagccccaggcagaacgagcttgttgatgccatataatcttaagcatttgcagcgattgtcattgccacctcatgacaattgagtctgggatgatagagcagtgttggcagcactggggcctctggaagggcatcgttagctcttctcaccaggcagggccttcccaccttttgcctctacactactcggggctttcatgctgggtgtcattggccctgctgggcagccattgccataggagccagaggggtccaattgggaattaagaaataaactataacaatcacaggcctcattgagcggaaagtgctcagagtcattttccaagggaactccatggagattactttcagaatgctcayaaataagagaaacagattccttctgcatgtgaagcgtattgcagttataaaatgctcgtgcatatatgactttattttatttccattcagtaatgttatgagtaaatagggcatgtgctgttttcccgatttctagataaataaatgaaatctcagagagtctcacttatacaaccactgtgttcctagcaacggtaactatccaattgaaatgaatctcctcccacctccctccctctctctttctgaacaaagggggttagcttacaattagacaaaactaagatatgaaaaaaccataatgagtaacagtgatgtgaaacagactggaggtgcccccaggaatttgcaatagaaggttggaatggttagggaataataatttaaataatagctactatttttgaaggtttaagagtcaagatagacaactaaaaccagtctagaaactccaataaagctaaaaataggatttcctgtataggcttaagcgtgtgctaagcactttgctaagttgttattactaacattattattatttgaggcggaatcttgctctgtcacccaggatggagtgcagtgctgcgatctcggcccaattgcaacctccgcctctgaggttcaagagattctcctgcctcagcctcccaagtagctgggattacaggcatggcatttaccacaccagctaatttttgtatttttagtagagacgaggttttgccatgttggccaggctggtctcaaactcctgacctcaggtgatctaccctcttcggcctcccaaagtgtagggattacaagcgtgagccaccgcgcccagccgctaagtgattatttaccagcgaaatcttgtctaatcccccatccagttcatgaaataggtactgtttttactgacatttttccaaatagtcaaccaaggactgaaagattaggtaaattgtccacagtagctcagagatgtggcttgaacccaggactgtctgaccagtggtttttttctctttttagagacagggtcttgctgtgttgctgtgttgcacaggcatgtgcggtggcacgatccctgctcactgcagccttgaactcatgggctatcaagccttgatcctcctgccttggcctccgaaagtgctgggatgacaggcatgagctaccttgcccagctactgactggtacttttgacacagcactaagttgctgcctttgtgggccccatgggggaagcagggcaggaactgggcctggaaggggatcagggttggcttgcatgggggccagaggcaggggattccgggaaggaagccagcatgactgcaggcacagggggcaacaccaggagtgagggcacgtgccggggggctggggagatcaagtgggacaggtgagaatgggccagatgatgaccgcactttggagcccagcagaggagcttagacctggtagggtgggctgttgagcccctggagggctctgagcaggtgcaggaggtgagaagtgcggtgtctgtacagatctctgaagtgaagcattggctgtggggtcaatatcatggccatgggctttcggaacccatgaaaagactgtgggctggacccaagggcagatgcatgtctcactgccatgctcgccctccccagctcaccgcacacccagttcctggcttccatgcaaactcaggaaacaccagtggagacattgtcccctgccattaggctgattgatcgagaagtcaagccgccttatgttcagtgtagtgagmtgatgggcttttgttctccaggccaaattcctacgatccgtttggtcccagaacactttgcctgtggagtttatgagaagcaagtacagaagtaaacttacagaatgtaattttgagactatggacagagatattagaggagaaaactgtgattctcctaaatccaagggctggtggtattggatgggttggctgcaccagcgggagtgggaagacccctttgtggaccttggtgctgtacgggagaggtgataagaatagccaccaacctagcacatcctgcaggctagatcctaggctgggtaccgtgcatatgagtcccgcaagaacactatgaggaaggtcttatgagtccagtattgcagaacaacaaattaagtctcagaaatattttacaaatcgcccaaggtcttccagatagtacatgacaagtgaaattacaatgtaggccttccctgtgtcccactctatattagcaggaggtaggtggtccaggtctttgctatgaaccattcagagtctgacagtttagcgtgcatttccccctcaattttgcctttgaaatctcttgtgcatttgaacagatgaaaaaactttgggattgacttgttggatatggtttggatgttttgtcccctccaaatctcatgttgaaatgtgacctccgatgttggagatggagcctagtaggagacattggctcgtggaggcagatgcttcgtgaatggcttggtgctgtcctcacggtaataagggagttctcacccagttcatgcaagagctggttgcttaaaagagcttggaccctcctcctctctctcttgctccctctctcactatgcgatatgcctgcttcccctttaccttctgccatgattgtaagcttcctgaggcatcaccagaagccaaacagatgctggtgctatgcttgtgcagcctgcagaaccgtgagccaaaaaacctattttctttataaattacccagcctcaggtattcctttatagcagtgcagatggaataacacacttgtacagccacaaatctgctccccctcttcctacttattcctatcttttttgcatcttccatcctccccatctccaaaacatttagggagaaacaaggctggcgtctgctgggtagcagtctgactgattatcaggcttagcctgatcaggagctgttggcattacacaccacataaggacagctggtatggatctttggccctgaaggtagatgaagaaccttcatatcggaggcatgaccacaattttgtttgcaaaactgaattaatatgcttacgcttctatcttcgtgcccctagtggaatgatgtttgtggagccagtggcctgtgggtgcctcgagaagaacaggggtagggctggctgcaccttatcaacagctgatcaatagctatcaacctgtcaaccagccagggagtcaaggattcgagggagatgctcgctaagcagcagcaagttcctgggcattggcttgtccagaatggcagttcctgggtaaataatgagaccgcatcaccagtggaaatgggaaaacacacaggtacaccatgctggtgcctgcaacacctcaaagaccaacatcttgcttcgggggttgaaaccaagtggtcgagactttacacaaatgcctggtcatggtcatttcttttctctgtaactttggttgccctgactaggtggctctgaaggagagaattcccccgacccgacttctttgcactggactggaattgagtattaggtcaatacgatcagtgctactttggaggtttctgtgtggactttctgatgggggaggaaggcgtgattactaacttgagttcctattaatcactctgttcccctccccggtcaggttcaggactttcctctgaagggcctggggaagattgcgtcttcgtgcagcttgatttggttcagccttctcttagcaaattccctttctgggtggccgactcacatttctgacaatctgagctgctcatggttgcttaggagatggataatgcattcctttagctaagtcacttgggaaacatttagcaccacttgtacatgggcgatcacatgtctcttagggcattgatacttctgacaagtttcttgaggcttctcctatccctggcttctacaatgcagccaggaacagcaaatgccatttggctcacttaatagcaaggcatctgtaggactgcgcctgtatttttaatcaagtgcagatttagaaaatacctaattagaggcaggacagcagcatcttaaggtcatgggctctgctgtgatattatctgggcttggatcttgggcatggcacattgctgctctgccttgcctcagtttcccaatctctacaataagggtaatgataggacctgcctcctggggtttggtaaatgataaataacttattccaggtaaagctcttagaatactacctgacacacagtaagtgcttaataaatagtagcctctattaagcatgttaaaccccaagggaatcctatttttaacttttttggagtttttgaaccagttttagtgatctagttcaactcttagaactaccagtgttcggtgaccacatgcagtgaactgagatatgctaggtgctgaatatataaagacaactatataaagtttggtttcataaagagattttcatctagtgaaagcaagtattcctgggcatagccacaataaatacgcaggtgccttctttactgtatcattgcactgaagtcaggcaacaagagagcttgtgtgaaccctgttttaaaaagggtgtaagcggggaagggatcaagaggactgaatgttagcccagattcttttgttgtgtgacctcgggtaagccactgaagccttctagatctgactcaggttcctcatctgagaaatggggctacaaagttatgcactaacttctagcagtaattcacgttatgcagctgggtaggagatagtgctctgtcccactgaacgtaatgatcgcgaggttttcttggaacgatttgcctgctgtacaggtggaactaaccagagggtgaaaaccaggccagttcacctgcgtggcttaacgttaattacatttgacattcttgcctggcaaaatcccaaactggaaggtggcctgaagcccctttaaggggatttctgccagcatctacgtgggacttctgatttgaggcacagtttgctttataaagaaccagattctctgatattactagtagcagtctttttccattagcagataagccaaagtgtattacatagtaattactgactctgctagaaggcagagcttctcttgtagccatatcctttgggtggatgggtggatgggagagccgggggcatctaggagggatgaggtaaggagtatgcatatttttacccagaagtgtactctgcaatttccacttttggttttgtctctgcctagtgagatgtaataccaaaatggctcacggagactgctggaaccccgtgtccagagcttgggagcaagcggtctgtgtctttcacagcactgcagctgcccgatttcaggctcaaaaatcagattggaacctctgctgggttcacagggcaaacaccctctggcaagtgactctttcagaggagggttgtgaacagccacgtgctgggtgtggaggcaagtgggtctccagggcagccggctgggatccactttgcacagatctcgcctcaccaggaggaagctccctggcagtgcaggcccccgtgatccaggagggactgcgcttgagcttaggtgatggcagcaggcgtgtgactcccacactgggagctctggccccagaacagaagcttctaatcagcaccacctgctcaaggcaaaaggccccgggtggccaggccagcagatgtctttatcagtggctcgacattggcagaggaactctgtggactcctgagggcacagggcggaagcagggagaaagggctgtggatggggatcagggaccctggattctagtctcagctctgccacaggctggctgtgtggcttctcccctctgggccttgacacagaaagctgacattagagttagatcacctctgggtccctgtggtgctagcagcctgcgttccttctggattmtaagggaccacagggaaaagctgttgcccagtgagagactcattgggtgggcagctgccccaaggaacatctttagggagccctgcagtctggccccatggcaccccagaaactaggagggctgccggctaatcccctggtgataattmtcagtctctgtgaaccactgaggcatttcctatcagggtggcatctccagtgaccttgctgagttggtgactttgacggtgaacaggctgggtgagactgggctcactgtggccatcagaacccaagctggcttcatctcccggccaggagagagcctcaccacgtgggctcctaacatccccctcagcagctccgcgtcccttcttcacagaggccattcaacagccagtgattctcaacatgtggtccccattggcaccacctgggaacttgttaaaaatgcagattcttgggctccaccccagaacttctggctcagataccctgggggtgaggcccagtaattcatgtttaaaaatccctgcaagtgttctgaggcacactaagatgtgagagccactgcatcagactaaccacgtgtgttcctcttttatttaaaaccatatcttattaaaacaccaacttagcaataaaagagcccttaaaaatcacccacagccctactgccccatcacagcacctgctgtcatctctcttccagccttggtccatttgcctgcatatttttttacgcagacatgcttatgttggactttttttcacttaacagtattagtgcgtcttttccattgcttcataaccttcatatttgtcattttcattgactgcagaacacctccctaatgtactggctttatggcctggctgccctgtccataagcatttggtgacttgccactttccatttttggaaaagtcacctgtctgcccagggaaagtcaccttttggggaattccactgcccaatgcctaaccttccctgtaagccctcaacatgaagtgatccaaagaagattgcttaacgragaaaaaaaaaaaatccagccagcccagaacagatacagaatctgcagggatggatcaccactgaacgttccctgccctccccagtgttctgaacccgagtcttttctcatttcactcgcaggtggcgtcagcagagggggagcccgggctgaggctgggctggagcctgtggcctcgccccatgccaggccctccgtctggtcatttcctgagcatcctggtctcccagcaggaaggccagtccttcctctcatgccccctccgccttcccccctcttcccctctggcaccctggtctcctcccagacactcagcttggccagcacaccctctagtggtagcccctttgttttgacaagacctataatggttctggggccacgtaaataacactaagattattttgttaggataaattcctaagtatgggatggccaggcctagggtaaccctcagggtttcttttaggccatgatctcttctgccagtggcagtctgcaggcgtgctccatcagtgggtccatgttgctttggggataaaattcgaacttcatgacatagcaaactatgttcatcattattggctcatggaccacaaactcaggccagatgcctagaaggggcagattagtgacataagtactgattgggccagacgatacgagagggtgggcctacaatgagctagagagaatacccaacctaatcacaatcaacaacagaaagttctagtgaaagagaaatggtggagagtgctgatgtccatcttgttcttggtttatgtctttagcctcagctttgtctactatacatctcctcctgcacatcccaggcatacctgaatgggccctgctctctcttgcctgttttttgtttcgtctgccttttcatgtgctgtttcctctgcctaaatgtttatttcctttttatctctctggatgattcctactcatgatttaagattcagccagaagggtcacctcctttggaagctttttctaggacaagctctgctatgttaggaggaggcctggcgtttgggtagacaactggagagggccttccctgcactgtatttggtgggatggagccatggcgctgaaggctcatcgtttttgagagcatcattgcaattcacttttcaaatttctttctttaaggctattccaagggacytatgagaaatgctgatggtgtggcctcttttcctgggcagttaccctggttagcccaaagtagactctggactcttccagggacagtccaagatagaaatatgcagttacatttagtaatttctttccttttctagactgagggccattttttcatctttatgtctctggaaaccagtagtatgcttggcgcacaataagtatttaatacattatttttgaatggatggatagaagactggagagatggatggaaggagggagatgcatggacacatggatggctggatggatggatggatgaacagacagatgggtggatggatggagggttgggtggagagatggatggatggaatggaatgctggctggctggctggatggctggatgggtgggtgggtagatggatggatggaaggctggagggagggggagtgatggatggatgggtggtgggagggaggcatggatagatggacggatgggtagaaggatggatggatgaagagatgcatagatggatgggtttatggatagaaaatggatggatggataaatgatggaaagatggatgggtggagagatggattgatggatatcctatatctattcctatgcttctgtggcttctgaagaggtgcctgggcagtgacttccccagtggtctctcccaaacctttcccctctgtgaccctctacctaacacagccttttctcctttttcttcttcccaccacccactctcccatgttcctctttttagctttaccctcatcccagtatttttctctcctttcttttctctttgatccaccctattcctaacataaaccagtccattccgtacctcctcttgcttgtttcaccctgagtaattagccaggaagtttttggtttagggctaatccccaggacctcagaaaggacaygtcctgaagagcagaatccccagaacatttcaggggaagagctgggaggaagggacttatgaggcctagatgctggagctgggtgtaccctacgggcccctccccagtgagtttccatcacccttcacaatggagtcaaatccatctgctgtcctggagactaggctggtagaggtgggaacgaacacacatgccctcaaaccttgtgggtggggctctaggttctggcattctttcaggagttgctagactgacccacaggatggagcacttttccctactgccccataatgtcaggggtaataggtgctgccccaatgacagtgctaaagcagaatcagggcagaccctcaggaagctgatgagacctttgcttccgtggagatcaaggagctgtaacaatgacacctgaagtcactgccatctttagggactggaaaaatcaccctgggtgatctgttccctgccccacctcaggcacctgccactcttgggaccccaggggattagaggcatgtcaagagcagacttccagaggacaaatcatgagtagtacgtattggaagaagtaatatgtgattggagaatagtaatgctaagccatttctttctgcgtggtacaaggttctcctgcccagtacaggtgaggaaactgagtcccagtgaagttaagtggctttctagaagctstactgcccccagtgaccgctggactgggcaaggctgttgcagctgcaggcctttggctgtggttgagctgcagttgtttgtgttagtttcagcagatgaggctgctggcttccctcttatggctgctcttccaaggcctccagcaggcccagcagcccaggagccttcaggcttgaagatggccctgccctcaggtaccctcctgcactgcggctctcttgaatctttaggaggaaaacccctagccatgatcatggtcttcatctcccaacccacactgctggaagagacacctgtacccagagtcgcccttgtactgcatttggtggaaaggtccctctagcagctggtgttggggctcatcttgacctgcaaggaggcaggctttgagtgccctatttgcagaatgtccagaggctgtcattctacacctgcctctcatttggagacctgaactagagttgtaaaggtggtgccaggagagggctttgccaaggcatctcatgaaaacctggccaacaagtgttaagggtccaccaactacagttactgaggcaaacacctcatctctgcattcagagttagcagakgacaaaggactcgaatgggctaaaggtcattcaggggcaagaatggcatttctggactcttctccttagtcatggaaggacaaggctgtgctgggaagaggtcccactctgccactaactagctggtgttgcagcttgaaatcacccagtctctgcccctgacggttcctggtccaccttagataatactcttcaccctcccccgccagctccctttcaggtcttcatcttcctgaatgtggtttcctctttgaaactttcatcttctcctgcagtgctggatgtgagaggacaatccctggaccatcacttttgaaatgggcaagaggtaggggcttccctaaagatcggaaacaggcatgagagaatgctgtgttcacccacctgacccttgggtaaacatctgaggctcaggatcatagatccagttgatggcagagtcaggactgtcccatgaagggtgccagccaactctgctgccatctggaagggcaagaaggctgcaggggcagagggcaatgtgcaggcttccacaggagctcctgtgtgagatgggggtcacaggtggtggcaggagaggactttgccaaagcatctgaatgtcagcatgcaaagtggggtgcatggggtcctgcaatgagaagaggttccggttcacctcgcacagggtcagtttcaaagcgtgtgtgttgtgtgtttctgtgtgtgaaggagagacggttttgtggcctattctaactcaagcagcttctgagctctagtgaagtagtttcaatttggttcctgcggcttaaaaggttgctggaacacttcagcaaaattgtagctccttaatttagctgcctgtcagttattttttttttccaggtggtttcaggttgacatttgtaaaaatgttttggaaaccatattagacaccttgaagtgaaaaggaatttaaagtaccttattccaggaagcgggattggaattattcttctgcctaccccaaatcggatcgctttcctttccttaatctacatggacaaagcccagtgctgcgttgggaaactgtagggtgctttgagcacatggcctttgtgaatttccttcctgcttgctgtcaccttcattttggggacttctgcttcacttgagcacagctaaagacagagcatttttattttgtttgtgagagcgtcaaaggatattagggacgggaagaacatccaggacattcctcatacgctcatccccactgctttcccaggggctcagagggtgagggctgcagccacattcacgttctgatgcctgcagagctgagagtcaccccgaaatccgtgactctggagcccccttgctctgtgaagccatacagtaaaatactgtgacatttagctgccagtttcaggccagctatgtgcccagagcttgtaccttaaattagaagagcctgacgggtgacgtatagggctttgccacctggacaactatgccatgattcctcctgcgcccttagagatggggagaaatagcaaccacctgccttgaaataggagcatctccctgtaccccagcctgcttgctctgacgccgtcaaatccattgagagatgctgtcagacactctgcctgtgctaggaatgcaaagaatgaaaagccagagctcctgcctttggagcagatatcgacagaccagtgtcaataaagccctgatggtggtctgggccacacgaagcctcttgaggtagctccgcaggatggcaggatgtctttctctctcctggtggagaacgaggacgatgtccaggtcacaggttctcaactctggctgctcattggaataaccagtggcggtttgaaaactctttcacccacattctgacactgagctggtctcaacagggacacaggcacgagtaggtatttctggaagcttccaggtgttttcagggtgcagccagggctgagaactgttgcactagcggaaggactcagattggagtcctatttggagaactgttaaagaaaaaataaaatggccaggcatggtggttcatgcctgaaatcctagcagtttgagaggctgaggtgggcagatcccttgaggacaggagtttgagaccagcttggacaacagagcaaaactctttgtctccaaaaaaaattagctgggtgttgtagcgcatacctgcagccccagttgctcaggaagctgagccagaaggatcacttgagccgaggaggttgaggctacagtaagccgtgattgggccactgcactccagcmtgggtgacagagcaaaaccctgtctccgaaaaaaaaaggaaaaataaaatgattcaggggagctgctgcatagggtgttgcagtggggaagagaattcaggctcaacttcgaatgcaaaggacaagtgggagttcataggtaaggagcaggagatggaggtcagtgaatggaaattatgggggaaacascaggagtaagggggattgtggctaaagtgacctaacaggattcctgctgatggcacgccagggtgatcagaccacctgggggatggcagcagatggggaactcaattcgatactgaagttggggggattcaggttaaaccagcttaacaggattcttactaaaattggacaacgcagggacaaaggtagaagcctagaaattagggcctggttgaggagagagttcaaaggaatctgagtagagtttagtcaaagtgagactctgtcagaatgacgggtggtacatggcgggtggaagcctgtggcacatgtggggcagagggcagggctgaaagatgggacaggatgggtttgaccttgacaattggggcaggaggggcagaggagtgagaagatcaggtctgtggtcttaaaagattactctgtkgtaaggagattaggagggcctggctcccagagttcagtgggggacacatggcatttgaggttctggttgggcagtccaggtggagatttccaagaggcagtgaagtcatggtctaaggccagggcggaggtggaagagctaccggtgtcatagccacatttacctggtttctgcagctgtgggagtgaactgtggatgttgtcactcacctggtggggggtgggggggggtcttcctaaaaaagcaggtgaaggacagaatagcgccagtgtggagagagccgaggaagaggaaactgcctgggtgaccaagaatacgtcgtgacagaggaggacaatacgcgatcacagacaccaggaaagaaaaaggtggctttctggagatagcgccccttccttcatcataacccattcattcagaccctgtctgtgagtatttcagggcaggaggaatggatggcagtctcgtcaataccccttaaaatttctgaacataggggccattgaagtgcctgtgtgccattgcctgcttattaaaatgaattatgaacaaatatatttcttttaattcttatgcagttctstgagatatgtattccagtttacaaacagaagctggacctcggagaggggaaacgattctcccaaaattgtgtagccaagtggaagaaacattggaatctaggtstgattccagactcttccrctgtcccatattagtttcacaccagataattttctctgatcagacgttaggaagatgttgaaaacacctaaggaatggggcaggggtgatgaacagatatacctgaagcaggagggaagggaaggtttttatatgatgatgttcactggagcatcattgacatcatagacaaagcagtctaacaacagaggaaaggtatttcaaggccgtgaaccttcaaatctgtgtttgtaaaggctatatatggtcttttccagtggttctcaaacttcagcatgagttgcaagcgccgtcagagcttgccaagacacaattgttgggccttacctggagcttctgattcagcaggactgcggtcccaaaataggcatgtctaacaagctcccaggtgatgctgctgatcccaggatcacactttgaaaaccactggtctaatttagcctgcacaggtgatgggttctacttctaaaaatgagggatgaatgcatttggctttagattgctgaactagggattcctcctccgggaaaaatgggattcgaaccctttgaggagactcttcttcagagtggattatttaaaaaaaaaaaaaaaaaaaaacagtctccaagagtcttcagaaaaattagccccaaaggcatgggatcggctgaactgcagctggtggagcagtgcctgtcaaatattgatgtgcgtgcagaacacctggggtcatgttaaagtacagattccaactcagcaggtccagggtggggcctgagcttctgcatttctgacaagctccagaggcrgctgctgctgctgcctgctgcctgctgcctgcacggctcgaccacacttccagtagtgaggctagaggatccgtgactgcactgctacatgtgacagatcattgagatttaacctctctccacctcctgagtaacatgatcgatgtcacaaaatctctatttgaacagttctataatgttcaaggaagcaggtaaaacagagcaaatgtgtgaatagttgtcattttaggggtgaagggaatttttttcccccttgaaggtttgaatctgctgaaataaactgaacagaaatcaacaggagaaaaggcatacccatgtattaatgtgcaattgtgcacgggagccatacaaaatatgagactctaagaagggtcagggagttgaggcttaaagaccattttcatgggggaaagagatgtaggcagttttgagggggtggtaaatgattcttaggagaaatgaatgagcccaaagaacagacagtggcctgagtcagagttcctcttagcgctggtggattgtgggaaggtgaggggtgcaagttcactgcagacaaagattgtctcatcatgcagataaagtctcccaagtaatgtctcggagctgctcttggaagaatacagaaaaagcctgtctgggcatggtgatgacttttagtcttttctcctgtagttcatctttcctagttattcagtgagattcctagggaggggctcttaagacaattgcttttttcgggggaagaagtttgtttcttcttcacttctggggagaaacaaggtggtttagaaagtctttggttctcaggcagcttctagggccttccaatttcctgtaattcaaaaatgcttggcatgccaaagccgcctmttttagggtattgttctctgagccccaacatcatagtagtacaggggaggggaaaaaaagtttgttctccaccttctaggttctccaatggagcccttgtaacaaaagacaattaacaaagtraatttacaaacagaagtttattaacatgtacatctcatatgtrcatgggagaaactcagggataagtaattcaaagaggtggctggaatttgggcttcaataccctcttcagctgaaatgaagaaagaaggttatgggggaggcaatttatgggaaggtgaccaggaaaactacagaaagcaagtgtaaggttcgtgttgcrgacttgaggctgtgccttctccctcgataagggtcttgtgatttaaggtcacccccgtcttcctggtacagagagggagatgctcttagaagggcagattttctctgtagatgtaaaatttcccttacgaaagggtaacttctctgttttcagagcttctcctgtgtctgcagtttctcaaaataatcagctcaaaataatcctcatgccaaagaggcatatttcagagtggcatattctggtctcctgcgtgagcttcgaaaaatcctgcaagatgggagacatccgatctctcacttttctgatgctaaacctgaagcttcaggaggccaaggaacctgctcagaatcctggcttcttcccattacctcagactccaaagaacacacacagtccaaccccttctttgtaagtggagctaatatcatatttaatgagagcagggtttctcattggcttttgacgtttggagccagataattccgtgttgggggaggggaagctgttctacgcatgatgggatgttgaccggcatcsctggtttgacctactagatgccattagcttgctgcctcccctgcgacccacccctgccactgctaccctggttgtggcaactaaagatgtcccctggtcattaccgaatgtctcctggaaagagcttgtctccagttgagaatcactgaactagggcactggaagtatggagaatcgcctgttgacatatttatgcctagtgttccattattggaacgctaagcttgtgggagttatttatatcctactgctcaaggtcatcaccaaggtctgatttttcacaaaaaattcgtaacctccggcatgaatgggttaaaacactcacccactcctgggccccagcrcaggcaatccagtcagtgtttctctgtggaaaaggaccctggcatttgtatttttaaaagtttcctgggtgacttgaaataagctgtagccaggcttgagaaccaccggagtcatcttccgaatggaggagtgatagagttctagaggaaggattttagatgatttttgaggcatggtgagaagctttgataaaacactgccgttacagtgtgagggaggcttcaaccaaagtactcgcttccctttgcaatattttttaaacgtagctgttatgcactaaatgccctgtgaaattaatttgtcattgttatgttctgccatccaattacaagtttcttgttactacttcagtaatcaaattattcttttaacaaaaaatgaggcaggggagctgttatgagaaccactgacaggtctccttccctaggcatcttttctcttctgcccacccaccggggagcaggccctgcttcctgcccttgccctagagggcggagggaaccctgccatcctctctccagtcctgccttcatgggccttcctccacaccctggtgctgtactgtttttcagaagcttgctttttttttttttttttaaagtcttttttttttccccagaaactttctcttttttttttttttcttttttagaagtctcagaagacttcagtggtcccattgtatacaaccacacactgttgcctgaaatgcaaggtcattcacagaatcgcccatggtgcacggagctgcgctcaggcccaaacggtcagattctgcttttgacccacctgagcccactccctgcatggctcacaragccctgccttctgcaggtaccaggtcagactctgcttcggcctcacccgagcccactccccatgtgtctcacagagccctgccttctgcaggtgcagcactgttgccacctgtgccacattctccgtgagatctgacatcccctctctgtattcctggtgatccaggctgtgccagtctctgtaccttggggagtgctcggcacctatatgttcaggcccagtacagggtctgctctgaggggatggggcctccgtggggcaggcagccctgagaggagggggtccctgtgtggccacatgggcgtggccttgtgtttcctgtgcraaatgggcagcctggcagttatctggtaatgagtgcatccaggacagatgaccaaactggagtcgcgtggtcgccagttgagaaccactgacctaggctccatgtctgcccaggctcccctgcgagggccactggcacttgcctcttagtcttcctcccyactcccacccgtgtccccgcccaccacgggaagccaggggcatcctgtgcacatttatgacaggataggaagcaaaatgaagacttctagtgaaatcgtcgtacatctgcccattgtcacatgatttggggcattttttcgaggtttatcaaggaagagtaaaaatcacagcagtaaaaagagactttgcactggcctgctggatcacaggtgccgcattgtttctgtgtgtattacctcatttaaccctgatgaggggatgggcactgactccattccaaaggcgaagacattaaggatgttaaactacatgttaaaacagcacaaggaaaccctgtctctactaaaaataaaaaaaaattatctgggcgcggtggcaggcgcctgtagtcccacctactcgggaggctgaggcaggagaatgacgtgaacccgggaggtggagtttgcagtgagccgagatcgcgccactgcactccagcctgggcgataagtgagactctgtctcaaaagaaaaaaaaaaaaaaacagcacaaggtgctgtgctctgagtttttagggagaaacctacctattctcaaatgtacttcacgttctggcacttcaaaaaagtaaaaagagagagaaatatttcccagacttacttgtcaatattctcactctattggaagaacacttttatagaaatgttaacctcatttgcattggcttttgtatcttccccttaaatctttaagtcattggtcacacaccccaagtgaacctagtttgaaaagaggtttatttctcattgctacacctgccgaagacccggactcaaggtctgctctggcccctgacatattcaatgctcttggcaacttaagtcagagtttcttcatctgaaaatgggcacaagtcttcagattggccctggataggggaggcactgtgatgtgtatgaaatgtctagcacactgtctgggacttagcaagctgtggtgagtrtctgtggcattctctgattgaaccaaaatcataatttcagttaaaactatgaaaatattgttcatcacttatggataactgtgggcattttactactgatgaacccaagaggacttgccagaggtcacataaagccaacagtcaggtgacaagatgaggatactgggtgagttccctgggccacacactggccatctgacctgaggctgagcgtgggctaggagtcggttcttctacacgagcacgcctaacagctctgccacctgctttcccagtctgccctgccgtagggtccaagaagagcawttcatgtccttatttgtttgtggcttcatttgtcccacgtgaagggcagagacagaattatgagtgagcagacggtggtgtcttttaaataccgcatttcacttcctagggacgtttcttcatggtgctgatcatgcagtgaacatttcctgacctatggaagtgtcagaaacatttctggatggaacatgtctctaaatttccaaaaggtkgtattttaggcctagacttcagactcttatatttgaaagaagtcactgtctgaccacccagtgctcagaaaatgaggtgggaaggtttggtggacctcagcctcccccactggcttcttagtggaaggctcatctctgacaagagaaggggcccttgagaatggagctttctgtgtggcaatgaacatggacttgaaacctgctagactaggtcaggggcatatgaaggcatctgggctggccagactccagtggatggacagctgtctcctctcttaaattttaagaacttaaatgccagggcttccttaaacattgagcaatgcttacatgctctgagtcagcttggatcgtgatggctagaaggagtcatagaggctaactccctccatgttcagtccaggagagggaaggtgacttccctgagccgacgtggctggtcagtgtcaaggctgggcactgagtccagtgcagccctctccctatgggttcctccctccaacctgctcctgcccagagctgctccttccgctctttctccccttcctctgtctctggggatctggcygatgatgctctttgtgttgtcaggaaatgtgcccagcagccaagcataccctgtcattaaaccgaatctggtggtaaggatgtctttatgaagacacctcatcctgtcatctgcctgtgaccatcacttggcctctcggccctttttttttttttaaatctatgatattgggaaggtcaaattagctgatcgctaaggtgcattcccatactaaaaaaaatgttcagccaggcgtggtggctcacgcctgtaatcccagcactttgggaggctgagacgggcgtatcaccaggtcaggagatcaagaccattctggctaacatggtaaaaccccgtctctactaaaaatgcaaaaaaaaaaaaaaattagccggcagtaatggcgggcgcctatagtcccagctactcggcaggctgaggcaggagaatggcatgaacccgggaggcggagcttgcagtgagccgagatagcgccgctgcactccagcctggacgactgagcgagactccgtctcaaaaaaaaaaaaaaaaaaaaaaagttctgttgtttctgatctctgagttatgctgcgagaaaagaaccactttgtccactgctgctccttgagcttggggagattgtggggagaacagaaagcagccgyccgccccccgtgtttctattcagtgtaagaagaagagacgagcccattctgctttcagagtggatgcggtgccagggggtttgtttccttgccattggctgggcatgttttactgcattattcttccatcgaattttccataacagagtcttcagactcaaatccaaagttattacggcaaatcctgctgggaggctgagagggatttttttacttttagggaaaacgggcctatattctaggcaataaggatgccatcttgaaggaaattggcacaaacattctatggctgacacagcgtcagcatgtgacggtgtttgctgggcaccgtgtaggcatggtgttgtgactggtgcccaggtattgcagctggacggctgcctggcagccatatcaacatgggatacctagttgtatggctagcctgggagtcttctgtgcatgtgattatagcrcggaaaatgtgggcaatcaggactgcctagcatccgtatgtcttgtatagtttatgacctgcrcacgggcagcttgtgccccaagtaatggagtcagcacgtggttgttatacaggtacagttacatggctaataggtgagcatgcattgaattgagacagttttgtgactatcccctgtgcaccacgtgtgcacacctacatggtcactattcaggctttgtgcatgtacatgcatagggttggcatgaagatactatgtgtataactgtatggtctgcaggcacgggatatttggtgatcacacagccatcccccaggccttgtgtgttgtaagctttctgcaatctgtggccaattagagggcagatggaagagaccctaagacaacatgaccagtgttaactttgggtctctagagagcgacaggaactatgagctagacggcatctgcgtcttgtatatttgtaatgacatttaaatattttaccagtctcttcgacgtcctcattgtgatgagtttttctcattgatctttccaaaaccaaaaggggccattcartgtttttattgtagcgaaaccaaagttaatactatgcatctgtacttttggcagccagaaccctgtagtccccagcgacgatagtttgtattttcaaatacactgtagcagtgtaccagatcctaccacacagggtgtcaagccataaacagagttccctagccaccccaccccagcttttctttatatagtccaataaagggaattaatgttgtatcaaagatgaaaatctgcttatcacaataggatttacaaaataattgcacacgttttctcatttgactagctcattttcagttctgacagcccttttctctatatcatctcacttgattccctkagcagctctgtcagattgacagaattctcacatccatttcaaagatgggaaaaccaaggctcagaacagctgtggaacttacctgcagtcacagctgctgagagaaggcaccaaacccaaagccaggcttccgctgtgctcaggaaacaggtcctgcttcccttctgcactctgccccagcagattgtatcagctgctttctgaacactttggttagcaagacactaggaggcacaaatgggaaggagttggcttgtcccacctccacccagtatcatgatggctacttgtctgccttggattcagatttctttcaagattgtccatgcttattgattgtaaatcagtgacctacagttatatttccattcagttcaatccacatatgaactgagtctcttcgatgttgatgatattgcctttgacacttggatatgtgagcagtgggacctatacaaatgatttcaactcagtccctgtcctctagttggcttccgaccaagtggcagaagccaacacacacagtcacctgtgtgtaagcgtagcaggaaagatgagctcaggatggtttaggaacacgcaggaggaagcgttggagcctagcttttggtggccggggggaagactttgcagagcatggtcctatttaagagtgtgctttgaaagatgtgtagggtttttaacaagcagtggaagcatgtgtgtgtgcatacgtgcacacacacattgcaaagggctgcagtgggtaagggagaggcaatgccttatagggagaagggatgacctaaatacgtatgagtctgtgaaccgccatgttcactaaggggatcataggatgtgtgtagaaagagagtagggagtggaggtactgaggctggaaagtttggttgaggccaaaatatggaagaaacatttagctgtatttttgagcaggagaatgacatggccacagatgtattttagaaaaatcagtctagcagaggccagatggatggagctgaggaagcaggcactgatgttcgaggagtttgaaggctcttgcrgaagtccaggcagcatcatgaatgagtcatctcagcttggcatgcgaacagtttttgtcatcactcctctgtttataatgaaatgctgagaatgtctgcacatccattgaccctgggttcatcctagctacagaaagtacctttcagcaccagacactgggaaaccctccctgaagtccaatgaaacctgcgtacgtcctcaaagctacagatgtcccatcttctgtgggtttcagaggcacatatctttaataaaaatataaaatggtgctcctaggcacacatcccccttctgtacaaaagctgaaatcagaaatggcaattcacaaaggttccagtttctaccaatctttgcacggccctacaagtgcagtcaagctcaagtgggcagtctcttgtctaacacttggtatggctccatttctgttggaattgcccatctctaaggcagctccctcccttctccccttcccacaagggcccttagaggcaccttttcatctctcaggcctgatccccctccttctttgcctgtgtggagttgtttattcttgtttactggggccactttccgtgctgctgctgttattgatgatctttgtccttggtacaaggccaggcctccaggaagaagcgtttcctgcactcagccactgctgccgttctcaggtgcactgtctcttcctctccaacatcctctcccctccttacttcttttttatttacacactgagtgggaagagctatgaaggaatatgtaacattttaataacgtctcattttcctccatttggggggcttcggtatgataaaagtctatatcatcaaaggaaaatgccactgggaagaaaaccagagaaatgttatggcaaaaatgagatagaaaatggatttttgaagattctgcactgagaacttggattgtgatcctgtgaaagtgtgtcctggctattaaaccccttaggaatgattgaagttttagattgccttaaaatgtaaggacttctagtgtgggttgaagacagtttctcaatcagaactttctggaaggatgacatacgtgtggctgttgaataatcttgtctctttccccaagggaactgccyttagaaatgtttccacttccttctcttctgtttctgtttttcctcccagtaagaccataccttgatttggaacctcaagattgttaagtgaatgaaattgcccaagcccagtaaagcygatggtctggggtatggcccttacgcgagatctgttgagtaaagccttccctgagcctcccagccagaattattcagtttgacatctgtgctccaaggcatgacctcttgggtgccgatgccatcagtcggcttccaaacsgtgaacattcagagtgtcgctgagtaccagactctatgcttttttactccaggaacctggataaggattgttctccatctctagacagcttagagcagagactgtgtcctgctcatccttgtagtgaaatttgtgcctttgttttagcaactatataggactctatgatccgcaggtgtgggcttcacctttgtctcccggcttgaccttctgctagaatgtatatttccctggtcctgttttatttgtgtgagccatctctaatgcttgtggaacaaagtagaggtatgaacaaaccagtgcgcaaatatttaagcttctccctttgaatcatacccctcaaaggccttagtattgaccctggtactttgtaggagctcaggaaatgttgcttgggttgagctcatttgaaatgaaagcagccagagaatgaacctgttatcctgcagggagttcattgagctgaaatgggggccctggcagaggaagaggtctgcagagcccagaacgagtagagctctggggtatgagccttgcagagcctgtgctcttctttgggagtgttcactggtccaggcttcagggtgcttctcagaggtctttggagggcaggggccacatctttcattggtcttcatccasgacggtagctaagagagggcctggcacctaacaggtgatgtctgctttggaattggaagactctctgcaagtgaaratcatttcgtcttctaccttattcatgctctcatgctctcaaattccatktaaaaatattttgcgtggaacatgaagatgttgttggaatattcaatatctggattggagctttctttgaagaacattctgttttctcatagtctcatagtctttagaactttttattcctgtcattctaaattaccaaaaaaaaggagaagtaaggaagtaagcccattrtaacagcttgttgcagggaaaagtgggtggaggcccctcttccctctcttgttaatgtgaaaagccttgaacttgggctataacatcaccaatataaaaggtggcattgattcagcacaagtaaagaagattggctttaattagagcatattgacaaatttgtaaatttgtgtaaaaatctactttggagtctattaaaatttgggaccccactatccagttgactaattacaatggtaacattcatcaactcccaaggactctctagtagcctttccaactctaagaagttaagttcttttcgctcagtccagggattcctcttagaaaattcctgtttgaacagttctggggtaagccattccattatcagagacatctgatttgggggagcttctcttcatagtgaaagggctggattctgcctttatgtaattccacccactggtcctagctcagctttagagcaggtcagggtggctcctctggtcccttgccgagagagaccttctctgaggccagcagcaaagttgttctgcagccttcgttgtggaagtctgagcacagttttctcctgcaggggtccctcagagggcttgactactgggattgcctttgccctgagatggacttgtcagtgccagcagaaaaacagagtgcccagaactggacagtggcaggtgccccacgctctgtgctggggagatgctgcctgctgccagcaattctagcaccagctgcttagccaaaaataagttctcagctgctaaggcctgatctttccgctctccttcttctggaagctgaaagtccagcggtctgccagctggaactgggaggttggggatttgtttctattcagatgaaaggaaaaacagtacgaggtttttcatttcttttttaaccttattatgtcaaaagagttgtcttgttcttaagagcaaaaaatatcaccattgcttctgaattttgctttgaaaatagcattaggagtggtggggctgcattgagcctctcccagcttcctggcagaagcccctatcgagagaggcagatgcagcttccacttgagtggagggacggctctgggaaaaagcccgaggactgggttcggctcagcaaatctgccagcctttggattgataaactgcctatttgcacagaggacaggagcagctgcctcaaccatggaattttccaaaggctgcaaaactttaaagatggaacttgaagttattcattcctttatttagcaaatatttatcagcacctgctgtgtgccaggtacgtgttgggtgcaaaggtgaacagaggacaatctgtatcctcagatctgrcaatgtctagggggagaaatggacaagagagcaaatgagcatggtctactgtagtaagtgtccataggtgatatggtttggatgtttgtctcctccaaaactcatgttaaaatgtgacctccagtgttggcggtgggcctggtgccaggtataggatcaggggacagatccctcctgaatggcttagcgccatctccttggtgatgagtgagttgccagtcagttagttcacgtgagggtgtggtgcctctccggtctcttttgttcctgctctggccgtgcacctgctaccactttgcctgcagccataagtaaaaaccccctgaggcctcaccagaagccgagcagatgccagcaccatgcttatatagccagcagaaccacaagccaattcaacctcttttctttacaaattacccagcttctgatatttatttatagcaacacaaaaatggcctaacacaataggcttccctgtagccctatataggagggtgcaatggatggtggtagcgctacataggagggtgcaatggacggcagtggaggtggttatggtggcggctgtagcattgattagtgctgttattgctgtcactaacaaaccgcaaggatttgcagcacaggtgaaggacaccagctctgctttagatggatggtcttgggggcagcatggaacttgtcagaaagggagagctgttggagccgctttggaagaataagatgaggcatgggagtgaggcctttcctgacaaggggcaggtaatgtgggaaggcatgaaggttaaaatgaatatggattgtttagggactagcagccatttcagtgtctctaaaggtgtgtgtgtgtgaaggtgggaggtaggtgataaaccattgtcgtagaaatggagaatctttgaaaagctctaagctgcagagacaaagtcagacttgcacgttacgtgatcactctggaggaattgtggaggccaggctggaatgggatcgggctggggcagggagaggggctaagagtgggaaatgatgagggcctgggttacagtggagagggtggaggggaggagacaagaaaaaaataaatcagagagaaggtcaggaggactccatggcctatgacctattcaggctctgtgtgtgtgtgtgtgtgtgtgtgtagtgtgtagtgtgtagtgtgtagggaaagatacacggtggatgaatgagagctggggctggggatatcaagcctattgactccccatgtgactgctgggaggagaagcaggagtgagaacaggtatgacaaaggacaaagacagatattggtccatgctgacttgggatggtgcacctgctttctggggctgctgccttgaggctgtaacaagctgaccgagagatgtagggcatggaggctgttagcctctcaggggagtctggttgctgaggtggtggcaggaggagaagcataatgggtagtgttagacaggaaggctgaaccctcacatctgtggtcaattgatttttgacaagagtgccaagccattcagtggggaaaggacagacttttcaacagatggtgctgggacaactggatctccaggtttgtgagtgaatgtaactaaaagaatgaagctggatccttacctcacaccatacacaacaattaactcaaaatggatcaaagacctaaatataagagctaaaacgataaatccgtctcaggaaaacatagaggaaagtcttcactggatttgcaatggatttaatgcagatctctgatggagttggtactggtgtcttggatatgacaccaaaagcacagacaacacaagaaaaaaagaaattggatttcatcaaatttaaaaacttttacacatcagtggacactatcaagaatataaaaaaaaaacaacccacagagtcacagaaaatgttagcaaatcatatatctgataagggattaatgtccagaaaatatttttaaaacccatacaactcaacaaccacaaagaaagtaacccccttgaaaaatgggcaagggactttgaatagacatttctccaaagcagaaatgcaaatgcttaataagcacgtgaaaggatcctcagaatcatgagtcactgaggcaatgcaaatcaaaactacagtgagaaaccacttcagacccattaggayggctattatcaaaacaaaacaaaacagagaataataagtgttkgtgaggatgtggagaaattggaacccttgtgcattgctactgggaatggtaaatggtacagccactgtggaaacagttagacagttcctcaagaagttaaacgtagaattgctgtatcctgcagcaatctcacgcctatgtatatatccagcggaattgaaagcagggattcaaacctgtacrcctgtgttcttagcagtattatttacaatagccaaaaagtggaagcaacttaagtgcccgtcatcagatgaaygggtaaaaaaaaatgtgacttatagatacgcaatggactrcagcctgaaaagggaagaaaattctgacatgtgctacagatgggcgaaccttgaggacatcaagctaaatgaaataagccagttacaaaaagacaaatactgtatgattcctcttatatgaggacctagagtagtcaaattcatagagatagaaaatggaatagaggttcccaggggctgaggaaagggggagttattatctaatgggtaaagaatttctgtcggatgatgacagtttttgaaaatggatagtggtgatggttgcacagcactgtaaatgtacttaatgcatttaattstatacttacaatgcctaaaatagtaaatattatgttacatatattttaccataatagaaaaaaatgtaaaggaaggcaggcagaccctgagcattgggttcccttagctctcctagtgcatttcgatcgtgaacattgctgagggttcctgtccactccctgtgcgatgcctgtcacccagggattcatcccctcccacctctaaacatttggctatgaaggtattgctcccaaactggacagaagctctctagggggctgagcctacccctggagggaccctggcctcctattccagctcctgcctgggcaggggacagagaaccgtgacaggcctctgatgctgaacgccaaatgtggttcttcctcgacagccagcagctgctttctggcctggaagtctttcctccacttgcagctcccactcacccacagttttccctggagaggggagccctgaggctgcattttgtgcatgatcattccaatgacgcaagcatccagtgcccccatagcccaagatgcccactggaggcagctgggagcccaggcactctatagcacgcatttcyaacaatggctgctagctcggggagagggatagggagaggtgaaggagtatccacaatggaaagaaactgtcccgacacagagacagtcacagtagcattgggaaatgccctttgggtggaaggtttagttgcagatggccaagctcttctcaaaagtatagtgcagtgatacttttgcatagtatttgcagttatttgctttgcaatgtggaatcagtaggagactttccagacttgagatttaagcacaaaattgtattttccctgtactgaagggtcccaacatgggtaatgaccctgattctcctgctatttggaggcatttacttctgagaaacatacaccatgcctaccattgaagccatggccaaaggagtatctgaaaactggaagagaagacagcttctaagcaaccagaagttatgtagccaagttcatgcacaaaagccaggrtgcttgacacctgtcttggctctggttttaggcactcacacgtacgaagcttgagattcttgtttaccagtccccacaaattataagccacagattaaaatgtcccagggctggcttggagaaggccctccaaatgcaccagagaagcttccggaaacttggcacctgagactaacgaaacagctttcagcagagtgggtggcagatgggaaggcttcagaagcaaggtgcctccctgagtgatgtcccaggagaaaaatgacatcaacccagccaacgagaaaaagccctgtcgtgctgtgtgggaaggcaggtgccgggccttacctagctccacatgctcatgccatacttgctggaagctgggwtgatgggatcccttctccagggccacaggaagggagaggttcatgggtcctggatggctaggccctggctgggactagagagcctgggygagagaattgccgctggggctctggaggtgctcgctggggaaggtggtccgcggcacygaagaggaaggcaggccatcaggtgtcccgtggggaaaagcattccccaacagtctccagcttgtgcctcgtgtgtgtctgtggcccacagaggcctggctcatgggtgctttgcacaactgtgggctctactgaggccttacaaagttgaaactggtgtgagacacacatgggaagatgtagcagcgatgccggtggcttccaggctcaggctgaggcagacgggcgggacgtgagtcctggctctgcatgcccaggccgtgtgtccctgctgagttgcctcacctcttcaggacctaggcttcccatctggtgcacagggatgagaccgcaccactcacagaggattgtatgaggattaaagaaatacagtaataaaatagccgtgacccatgagcatttaagagatgacaatgacgtaattaaaatgtgttgggcgggggactgttgctcactgtaggaaagatttctcattatatgtcattatatatcatattaacataaaaggcttttattttatgttgatgaagtagacttcggaaaatgcttcaaaggatctagggggtgccctccgcatgtcacaatgcatcacctcggcccctggtccacgtggagaggtcacctcatttccccacaatgccgggaaagtgagacggtgctgctcctcctccacaaatagcaaggcagggaccttccccaggggcatctgggctcccacctccagagaagcgtccccctggaatctttcttttcctgacaacactagatgcctttctccccagccccgtgacaaacgacagtcaagcttgctgccagggaggcagggaagtgacgatcccgtcaccaccccccaaccctccgtggggaggggcaggcgggtgtgggatccatcacgcccgcccacgtggatggcttcaaagtgaacagttggcattcctgcggggtggccctcgctcctgcaataggccatcccgggcggccgctccctccctcacctacgatctgccgtcagcagctgcttctgacaggtgcgcgggctctccatggcagatggtgaccaaaatgggcttgctggcaggctgtgctgccgcgccgccctccctcgcacacactgatgtgtacacaaacacagcccggccctccgtgccttctcgtggcacctgcctggggtttcaggggcagccagagggcttattccagagtcgcaggcccatttcccccaggccacccacctcactgggacccttccatttttggccgccagaccatggatgtggcgtgtcccacttcccaagcacggcatcstccccagtctccttgctagtgtgtgtggtaagcggcacagctgtgcacccactgctccccacgatggctttgggcttggcctggacagaacccacgatggccgagctgccttaggccacagtcacaggctccagatgtggggcctgggccaccctgtgctccctctcatctgtttcccggagtgtggtctggtggatgtcggacaggagagactcgtggccaccgctccagtgtccatgagagcccaagtgcaccggaagcctgttctcttcacaaaatagcaagacatgtctatgccacagtgaccatgtgccaggtcaccgagcccagcctccctctgggagagagtgcctctcccctctgtcaaccctgtgcctaggtggggagctgcagctgcaggatcagagtattgccaggccacccagctcggccacccatcgccctgccggagcacctgcccctccctccatgtttgggcagctcattccaaaccaccacccagccaagacagccagatgaggggacatctggcgcgagatggtcgccaagtcactgctgttccatcatggcagaaggaagatgagctctctgccagattcttaaagagagagagagaataaaatgtgagttacatgcccggcatttttttttccttctttttaccctgacacctcagctgtcactttcctttctctggaacttggactactaaggaccccatatccataactatttagggtagacctttaccactggatgctgatcagagtgccagagtgagtgatgggagtgggagcagagaggtgaggcttggagatgaccttggaggaagaatgcatacacaaccatgtgctcacacacacaatcacacacgtgtgttcacacacacccatgtgctcacacacacctatgtgctcacacatgtaatcacatacacacatgctcgcgtacacccatgtgctcacacgtaatcacagacatgctcacacacccatgtactcacacatacacaatattcacacatgttcacatacacgctgtactcacagtgcacacacacatgctcacatgtgctcacacacacacatgtgatggatcacgaggggcagaggagactgagactggctattcaccatctgtcctccagggtagggctgcctgcagtgagtgtgctttccatgagctgatggggtcagaacccattagtgggaactaaagagtttatttcctgctctttcccagtaaggggagaagcgtgactctccctgtatccgactcccaggctcacacacttgtgtcgggcagtggcgggagagagtgtgtgttcacagcaatggtctcgcagaaagtctaccgtggtgggctgagggaggtcccttgcagtcacggcagcttgtgggctgtgtgaccttgggcaagttccttaacctctctgaacctgtgttcttcatctggaaaatgaggctatttgcttcttgaagaatgtgacctttcagctacttctacaagatgatattgtcactttcattttagagatgagcaaatccaagtacagaaaggctaagtgacttgagcaaggtcatgcaggaargtggggcatcctttcaggtaatgaaagcaaagaaggggagatgggtgttggggatgttcaagaataggcaggctgggggttacatccagggtgttggtgcagacaggaatgggggccacagagtcctgggtgtattggaggcgtctccttggtgctggccagtctgttgctctcttttccctcctggcataagttaaacggacaacctactttcaaacacaaaaggtgggttttcacagataagccatatctcccctgctctgtgcttgttcctttgatttctccaaaaagtgcarttttccatatttctgaaaagtcatgttgtttggcccactttctaggccctaggaaccaagatgaggcccatgctaggatggccctgagtcttgccttgtcagacgtgatcttctcttttttgaaacaggcctcactctctcaaccaggctagagtgcagtggcatgatctcagctgcctgtggccttgatcttctgggctccctgtggcctcagccttctgggctcatgtaatccttccatctcggtctcccaaatagctgaggccacaggtgtgtgtcaccacacttggctaatttttttattttttgtggaggtgaggttcactgtgttacccaggctgatcttgaactccgggactcaagtgatcttcccgcctcggccttctaaagtgctgggagtgtaggcagaagccaccatgcccagcctagactatgtgacattttctttgtgttcttgcaaatgtgatgaacaagaactggcatctcacaaccagaggtggatgtgaaacgsccacgttctcaccatcagactttcatcagctcccctgggtcctgggcagggtgaggtagattttagggtcatgacatgagtcagtaagggcaggtggagggttgtggcagcagtccagacaaaggtgggtgatggctgagccttagaggtggcgatgagggtggaggtggatttgtgaaccattctggatgaactgtcaagctttgctttacaattaggacttgctatggacattggatggggagagttgatgatggcaatgaaatgtgtagcctggaggagaggtagcaaatgatgccgtgtgccaagagaggggacagcgaagaccaaccgctttgggaaaggaaggagaatgtctccgggtttgcacggggtgcgtttgaatttctggggtggggttgtgagtggcaggattctgtaggcaagagaaragaagactctggatcccaggaaatggtggggcacagaktgaggcacagagcaggaattgtcattggtctaaacaccccagcacctgaagtataggatagcttacattttaatcaaaattcttgcttgctccttacatttttattgtaatgcctattctacctggtaatcacattctgaaacctgataaagtatcaattctgagaatttcattaaggatcacatcaatctttaagctacactggagatgcaccgaatctttgagtaggttaataggattgcaaagaagaaccaataggtataaacttcttagaatttctattaaaaaattgacaagcttcgacaccacattctaattttgtttcaagggtaatcacgagaccaggagcactagcaggaaaactgtgtcaccacagacagarctggctcactgtctggaaacagaggccagggagaaagggtcgcatccctgggacgagatgtgcaaaaatcgggcttctcagcatcattcrttagcaccactctgactttacatctgcatagtgacatttaaagaggaacatgggctgggcgtggtggctcatgcttgtaatcccagcacttcgggaggctgagacgggcagatcacttcggcccaggagtttaagaccaccctgggcaatgcggtgaaaccctgtctctaccaaaattttttttaaaaaattagccaggcatggtggcacatacctgtagccccagctacccaagaggctgaggcagagggatcgctggaacccagaatcaagcctgcagtgagctgtgagcataccactacaatccagcctgggcaacagagcaacaccgtatttctaaataaataagtaatagaggagtaggtaataaaaaaatccaggttttaatttaatttgtttaaatgtaaggggcacaagtacagttctgttgcatgcatacattgtgtagtggcgaagtctgagcttttttagtgttaatatcacccaaataatgtaccttgtacccattaggtaatttctcatccctcactcccccaccctcccacccttccaagtctccagtaactattatgttcttgcatatttagctcccatccgtaagatagaacatgcagtagttgaccttctgtgtctgagttatttcacttagcataatggcctccagttctctccacattgctgcaaaagacatgattgtcttctttttaatggctgagtagtattccatggtacatatacgccacattttctttttccgttcatctgttgaaggatgtttaggttgattccatatccttgctgcagtgtgtagtgctgtaatacacatctgagtgcaggtgtctttttcatgtaatgatttattttcctttgggcagatgcccagcagtgggattgctggattgaatggcagttctatttttagttctttgagaaatctccatactgttttccgtagaggttgtgctcatttacattctcaccaacagtgtgtaarcattcccttttttctgcacccttgccaacatctgttatttttttgactttttaatagtagccattctgactggtgtaagatgatatctcattgtgcctttgatttgcatttctccgatgactagtgatgatgagcactttttcatatgcttgtgggccgtttgtttttaaatgaagttcatctctcccctcatgagaaaggagatcatgtaaggtctcttgtcacacggggacatggaattctttttagttaagatggcagatttsgtgagtggttgagaaccatggctccagagtcagactgcctgggttgaaatactgcctctcctctcctttgctaagcacccttcttaccaaatgcagcagatactactgtgatctctagagaggacgtgatgaggataacatcagacagcatgtgtagagcatgcaggggagcctggtacagggtgaatgcatacgcagcatcacccctaggccctcctcgccccaccaacatgcacgtgcttgtccttgtctcccagaaacacaggactttcacttgggttgatttaatagactcaatcaagatatttcttcatagaagctgggcacagcggcccatgcctgtaatgtcagtactttggaaggctgaggtgggaggatcacttaaggctaggagttcgagaccagcctgggcaacatagaccctgtctctacagaaaataaaaagaattagcctggcatgggtggcacgtgtctctagtcccagctacttgggaggctgaggcaggaggatcgctggagcccaggagtttgaggcagcagtgagctatcgtggtgccactgcactccaccctgggttacagagcaagaccttgtctattatttttaaagatatttcttcatagagcaagtcaaaggaaaaagatgatcctccgagcctgggtccaggatcttcccatagtggtcttcccatggtcccatccgttgctgtgggtttgtgacattgtgacatggagtatgcatgtgtggcggggacgcttggccaggagccaccaacactctcgtatggaaagtctgccaacaggctaggtcttccaaggaccaaaaatctgggtggcctgtgaaaaacccaagtcacttgtttggggggtgccggtggaggacaggaaagggtggaacaggatgcaagtggccaggcccttgacgctcctacttctttgggcataacccccatcacctcataattcccacagtgtgacattccgtcacatcgcaaaaataaccaacacagtttagagcagtgctcctgaaatagaatccatgtgatgtattatctcaaatacatgatttcacctcttcctcaaaacagcactgagaggtagatatcttatccccctcttacagaagagaaggccaagcctcaaggtcagctcctgaaggtcatgctgtttggcagaaccaggagaagagcccaggcccctcttgtccccaacctctatgcaaacatgatctcctggagaactcctggagatattttaaggagtgtttgatacttagagatgcacagtgctgctttcagtgtagagtgccatttttgtaactccagttaacatggatttttattgtctgaactggaaagcatgccaattatatgcaaatttaaattgtataattagcttatgttcttgagggagttccagttcttccactggttctgagcctgacaaaaaggaaaattatgctttggcaaagaacacctatggcctattttgaattctcctcccccacacccatttttcctttctccctccctccttctcgtcttkccttcctcctttcaaaaaaaaaatcctgactgtacttcattgctaagcagcttaaacagcccgaatgagacccctccatctgacctccactcaggttttacttttcctctttgttattctcttggcaattagaagaaccgaagaggccagagtcctccgaagacgcctgcttggaagttgagatgctgttgctgaaactgctagaatgccaggcatgctrtcacctgcagctttgagacgtcacgctgacagtatcacaggaaaacagccttttgtgggccgtcctctrtgtgttcacaccgtgtcgtttttaagctttaaaggaaactgacaaaagcttcttttctctctgtcttgagcttcactgcgtattcttaaccatgtggagctgggagctaacgcatcacagccaactgtatctggagtgcatttgctcatatagcccttattttattttttagtcttakttttagtttcctttgaatataataataawaaaaaaacccaatcattgaattcttagcttcagccaatatagtgtgaggttagacatattgcagcccaagggagaatttctgcttgcaagctggtcagcctgtttgcagctgacagatgtaacctgccctagggcaagagaaagtctcaagggagcttttaatttcttaatattgaaatgagcacaacctttattgtcttaatcagtgaataaaaaaaataaagttgctaagtctcattttttaaacatggcgtaagaggattttaagaaattacaattgctttttaagctgctgttgaaagttaattttctctgtgttcaggaagattctgccagcagctcctagctaggtagtcatattccagttaagcaaaactttcccaggggtggcgaacagccctgttttgtggacaccgcccctgggaagggaaagggtgtgtgtcgtccacagagtggttttactttgtccttgaacttggtttttatcacgtttcataaactcagaatacaggagtactcatttaaaattacagcagaaatcttctgatgcaaactgcattcttttagaatatatgatactttaggcaagggccgtattaacatttttttcgccattcataaagaagggattgatgaatgatagtgaatagcccctatacagtcataaggaaaatgtttccgtttttagtctgaacaaataattgtatatgaaaaaatctgatgtattgcagctagtcgttcttaagtgtttcttaatttaatccaaatttgaaccacgtttctttaaattaaaagttcctcaattacaagggccacaggcttgtcaattctggttccctggtactttgtgtaatgcccgaatagggacacagtaaatgtgtgctgaaccaactgaaaaagttgctttcagagctacatgggaatgaatgtggacctgcagagatattacatgtgatataaactatcgaacatgatgttccaggtatagaacgaagatgctcaacgggagcataccagaatcatgggacaggggttacgcgtttgaagccaaagcataactttggaatatttagagaaccctcaaaattcaacaatacaagcaaatcacctgattaaaaaatggacacgagattagaacagacacttcaccaaagaagtcccttcacctacaggatgccttygtatacagaaggcaaataggaacgttaaaaggtgcccagcatcattagtcattggagaaatgcagatgacagccacgttgtgatgctactctacagcagttagaatgagcaaatcaaagaatcgtgacaataccaagtcctgggaatgacacagagcaatgggaactctcatgcattgcaggggactgaggtggggagcacaaagtggcatgatcagtttggaaaaccattggaaatttcccatcatttaatatacttccacctactgtgagccagcaatcccagtcctagatttttacctacgagaaataagacgacacaraaacccattcccaaatgtttacagcagctttgttcataatagccagaaacaggaaacaacctaagtggccttcagttgggaaatggaaacaccacactgaggaatgcgtatgcccaggaaggccctgatctcgcctgtggctgccatgaggccctgcacaagggaagagaagaagagaaggccgagtggagaaccgtggggtccctgaagcttcctgtgctctagcgcacacacagccctcagcaaaggtaggagtctggtgcttccaggcctgtaaggaattcggtgcctaaccattcggtgataattagctaaccacactgagacttcaatggccacacctgaaagagaagacagactttacagaattagtccaagaaagtcactgaacaaaggaacagcagcagcagaagcaacaccacactgtggggcaggacatckgatttccagagttgccacattattttttaaattgtctgattttcaagaaaaaaatatgtaacaaagaaacatgacggtatccgttactaaacaaagactttaaatctgctgttataaaggtgcaccaagaactaaaggaaactgaaaaaattaaaagaaaatgttagagtaatgcctcaacaaataaagaatatcagtaaggagagagatattaaaaaaaaaaaaaaaagaactaagtagaaattcaaagatacaataactttttaaaaaatcgccagaagggctgagttggcggaaraaagaatgaaactggaagataagtcaattgatattatccagtctgaggaacagaatttaaaatrggggaaaaacggtgatggttacataaccttgaaaatattttgaaaaccactgaattgtaaagtttgaaaggataggtcaggcacagtgacttatacctgcgatcatagtgctttgggaggctgaggcaggaggattgtttgagcccaggagtttgagacagacccaggcaacatagcgagaccccatctctacaaaaaataaaataaaactagccaggtgtggtggtgtgctcctgtagtccctgctacttgcgaggttgagacaagaggatcgcttgagcctaggagtttgaggctgcagtgagccgtgatcgtgccactgcactccagcctgggtggcagaatgagactctgtctatgaagaaaaaaaaaacgaattttatgtgaactacctctcaatataaaatgattatctggggggatgggcaagagcacagtttagaaaaggctctggaagacacagtcccaagagacatgtgtaagtaaacaggaggcatcctgctgacttaacttcctcattttacggctggagaaactgagacccagatgagtgaaacaaactatccagtgcttcttacttaacagaaacaaatgcctccaaccattctgcagtcggtgtgacccaccatctcagtttgccaggactttcctagcgttggcactgaaagttctgcatcctgagacacccccagccctggcagccaagacacttggccactctgtcaaccgtctgcagtgagactattctttctagtggctctgaattgctgcagttcttctgtgaatgagaagcggtgacattcagaggagtcccattgcccactgaattcagtgctctaagcttaagcatctgctgctatgcttgaagttcttttctattcaaccttttggaatgaaggctctttccttttaacaaaatctgcatttcatccccaaggtgaaacctgctatccttggctttccctgaaaagtgaaaagtggttttctttgtgtactaaatgctaagcatataacaaaaatcagaagttgtagttaattgattgcagatatgaaaaagcagattataacccctcagagatctatacaaagacagggacagggaaagagaaggagaagatccrtgtctcccgaaactgaaagccatgaaaagaaaactcgtagaggaaaagtcacttgaattatttttaaaagccagcagacctcaaaggaaagcccaaatcaagaggaagcagcagtccttgaatgcatgatggagggaaaccatcctgcgggtggagggtgcactgtctgagccagagcaaatgggtggttgcacatttcaactataggaccctgagtttcatgctctggccccaggagggtgcagcttagacctgcagccagccctgtccagcctggtgggtccccaccattcacgatgtgcggtagagaaggaaggacccattccccttgcatctaggaagttatgcttggaatttgtgaggtgtggggaggtgaaggacgacaaggaagtaatgggaaaacaaatgacggccacccacttcctctgggttcccacttgagctcagccttacagaccttgctgcatgcaagcaggtgagcctcagaggcacctgctgtctttgcctgggttcacgtggttccttcagtctcctgaagtggccccttgtaccactgtgattgcaggcgatggaaaatcagggggtgtgcagctgggtccccagagacgagtacgcagaaataggccacagcttgatgcctccagcagcctctccatccacctctgcttccatcttttcctgtggttgagccccagggtcccatctgctgggtcgccctcaccctggcctagcccacctttccagtttatccttgatttcacctgacttgccctccctgcactctcctccggacctgtcagcaccctsagatacacctcattacccccaacccccagcctccatgtgtttggtcacggagtttcttctgcttggagcatgcccttcacaccctactcctgcctactgtcaaattcccagttcagtgcccacctcctcctgcaatttcccagcaggattaacctttccttcctccatgccctcaaagggctgtttgcacctccatttccgcacatcccctctgcctcgcgtggtggatattcacagtcccgtgtgtcctctctcctccaagggaattctgaccctctgggtgggggacaggagtcctcgtcactccctggggtgtggctgttggtgtgagggaacttctcctgcctgagcctgcttccccagcacctggcacggcacctgctcacgctgggcactgcagacacgtcgtgggaattgcccgtacactcttctgagagcacctcgcgggcagggcttgtgctgttcatccctgtgttcctcgtgcctagcccggtccttgacacacagccagtgcgcaataacaattgtcgagattcattcatgaagtgaagttggagagtttaaaaacttcttcacagagaaatctgctcgcttcggctgaactgtgctgacttcccaacccttcggtatcacaccccatgcccgggaaagcccaggaaaaccaacgcaggaaataaacgattccatcgggccgtggtgctcccagcgtggrtttgtcagtgtccttatgtgagggcccagggtgttggagccatcactggctggagcatggctggttactgtggcaaagggtggacaagtagggacgcttccgctagtgctttatagcgtctgcctggagaccacccatgtgactttcactcacagcttactggccaaagcaggtcccgtgggtgacctgacttcaaaaggagggtgagggagttggagagcacttgtgcmgttgaccacacttgcctgcaagagcagagctgcttacactctaacctcacatgggattcggtacgtctggggaagggcccagactttgcatttcttgcaaactttgcaggctgtctgaggagcaagggcagagctgtggagccaacaagctgaaacaaactcattccttcctctccttctccatcctccccgtcctctgcagagacacaactcagcttgtagctctgtcgttctgcattgcaaaccaagagaaatatccttagcagtctgaagacactgtgatttacctcgagggtgcagaggacacagaggaatagataatgaaagccattagctgtgtgacaaacctgcagagtatgggaaaggacggaacacaggagcgctgcagccgtacgaagaagccccatccgtccagctagaggccgtgcatttgcataagcaggtctcttaatggaccaagttagatctaattgtgtcacctctttctctcctttccctcccaatgagttcacaaagctgggagggtcagtgagctccgatgggggcttgtaaaggcttcagcccctttgaacgcgctccttgtcattgtcacactgtggtggcctgggtttgtcctccttgcatgtgccagcagtgattgatgactcacaggggcaattccattgtcccagagcctggagctcctgttgctccggggtcctctttggtgttgaagagaagcactcatcccttcgtcagaagacacacacacacacacacacacacacacacacacacacatacgcacactccatgtaggcttagtaagcccagccagtcagtgcccagtcagccgtcccccttccttgtggctgaaccgcaggaggtgggggtgcatctgctctgcaccactcagccagagatgcaggagcctctgcccagctcagaatagatgatgttttcttattagtggctttatttaaaagccatcccagtcatttcacattttttttttaaagttttgattgacatctatttggtcaacctgtgctccctatggactaaaatagctgactggggcattgtctgggcttattaaacctgcatgttgtgtgtgtgtgtgtgtgtgtgtgtgtgtctgtgtacacgcacgtgtgcacacgcaggacaagcatagcatggaatttgatggagtggatgtggagggaattgaagtggtctccgtgcagaagggggaaggtaggaaccaagtgaagtgccttgtacaggcgtcctgctgccgctagagggcgaagtgagtctagaatccacatgcccgcgtcctgcctgcgagttttcccctaaagcagctgtgctggctcccggacagcagcttcaagttgacctcttagaagcccgaccctaatttccgatgggctcagggtcataaattagatttctgttctaggaaactaatttcataccaccacaatactttaaaaagtgatcacaaaatgaaatacacatatacgttttacaaataattacatgaaaacctaacacttaaggctaaattcctttggtgggtgtaggggatggggattgcttggagaagacataatgaggcttgcagtctgatgaggtttgaactgcaggtaccctctttctttcctgtgactttccctttagcaagcacagccattcctccttgccacaagsgccttcaaactgtgatggaaatgagggtcatctgtcttggaaatatgcaccgctgagtggatctgcctgcccatttccggagccctgtgcctggcgactgctgggggatgggcagttgcagtggtgactctggaggggcagctcagttcataggatgtaatcatggttggatggactccagagggtcataggatcctttgaaattataagcaagtatttgattgtgagtttatctgggtagagtgtccaaagcattcactggagtctcaagggaatccatggtccccaagagacactattgtacgttcaggttcctttctagtaatacttttttctaaaaagtgtctgtaggtcagttcttctaaggacttctagagatagtagtgatagtggtacaacaaagtgaaggtacttaactgtacacttaaaaatggctaagatagtacattttatgttatgtgtattttactacgactaaaaaaaaaaaaaaaaaaaaaaaaaaccaacaaaaaaaaaaacaccaacagggagaaccacttgagcctgaraggtcaaagttgcagtgagccatgatcacgccactgcactccagcctgggtgacagagtgagaccctgtctccaaaaacaaaacaaaacaaaaatatgtctataggtcagtcctcctaaggcggggggtgaatacatacatacggcatccttgtgcgcacaaacacagggtgcacatgcaggcccctccctcccacgcatgtgcccacaggttcataggcatcagcatctctagagccagccccctccactccctcccgaccctgctctgtaraattcctatacaaggttcttgtggatttgtatcatcccttgcacctctcacgtgtcgcaggacagaacactcggcatcctgggggcttccttatcccacagccccaaattccgggaacagcatggatgtgggagggggcatggaatccagacctggattcttgtcccggacctacccctcacccttgtgaatttgagtaaggcatgtgaatttgaataagatccctaactgctttgggtttcctggtgggtaaagtgaattcaagtaaggtctgtgaatttaagtaaggtccctaactgctttgggtttcctagtgggtaaagtagaataacggccccaccctgcwggatgagtagcctgatgacgtgagatggtgaaagagaggcaccctgcaatccgtctctgccccattagaggggccctgcaaactcctcctgacatccattagaaaatggacactgtacctggtgcttaaaacgcaaatgctgctttcctggcactctgagtatgtctcctgtcatctcctagaatcaggaggttacttgggaagttggtggcgcttggtgtttagagcgtatatctctttgggtggagggcaggygggcaagtctagctctcttgccatcaggtgacccaggacaagctctctgttagctttctgtctttataatggcrtcatggccactgggatcagctgggttgggcaggagaaagaatggccaagccatatgcttggggcaagtccttctgctgtcacgttccttttgcagttctgtagaggagcacagggtcagcgctggaagctgctgatacaacaggctggagyataacgaggtgtctttgtggggtgtgcttgtcatgttcccagatgtgtattatttgacagctaaagaaacaaaagcaacaaaatatggcatgtacgtagagtggaatagtgtgcagccttaaaaagaaagggtattctgacgcatgccacctcctggaggaagcttgaagacattaagtgaaatatgccagtcacaaaaagacatactgtggaattccatgtatatgagggagctagaggagtcaaattcagaggagacagaaagcagaatgggggttgcccggggctggggagtaggggaacagggaagtttttttgtttttktttttttcctatttgtatttttattagaattattgaaggagaggggagaggtgctattgataatattggggcttctcatctaaaaatatggggagactctttgaatccatttgtattgtataacaaactaccccaaaacttaatgacataaaacaacaaatacrtcttatttcttacagttcttgtggtctggagagcccatctgaggctgaatagtcttaggtggcctttccttcatgttggggtctcaccttacacagctaggatgatgcgggcctctttccatatggtctcggatctgcagagttactaacccagccaggttcagtggtagcacaggtgatcctggcagcaagagagggcagcccccaccccatgtacaagtgcttttcatgcctatgttagtatcacatatgctatcggggaacarggaagttttatgcagagtttcagttcagaaagatgaaaaagttctagagatagtagtgatagttgtacaacaatgtgaatgtacttaacacaactgtacacttaaaaatggctaagatagtacattttatgttgtgtgtattttaccacaacttaaaaaaaaaaaaggagaatcacttgagcctgagaggtccaagctgcactgagccctgatcacgccactgcactccagcctgggtgacagagtgagaccctgtctccaaaaacaaaccaccaccaaaaaccaaagagatggcctgtgaaataaacgtcacgtgttttgagtcccggggatgtgagctgggtagggagagtctgactcacatacaggctgatccatgtctagagctcctttgggtattttataacctactgggctcctggggcagggcrgcatccttgtctagccacctgtgggagtagtcaggagccagggttcagggctggcctcggctgctgaccggtggctgtggtcatgcctgtcctctcccccaggcttccctgtcctcagctgagaaacaggaataagaagcctacattttagtcaatggaaggttcacgtgaayagagggtggaagccctttggaaacactgttgttctggacaaacacagggtcctggtctccactctgggctctgggtctcaatgcctttctaaccttgcccactggtgcccactgccacctgtgctgccaggagccatcctgcatttcccagggtggtatgagagcgtgtcacctccatgtaatrggctgagacactcgggcacttggagaatctcggtgatcctaatcgtaagcttgttagcaggctgcagtcagcagaatgatcacatgttcattacatttattaccagaaaggctctttactggccgccctagaaggacggatgggacctgctgtgcccggctggcacgccttccataaggagtgacccggctgcttttcgtgcatctgtggtgttcctatgagtcgctggagctggagaccgagctgaggtggatgaggcctagggggctgggggctccatcacaacttacacatgcctacccgccttcctgccccagagatctgctgctcagccatagaaatggggaytccatgggggaatgtggaaatgggggctacttaaggagggcaggataggcaggctagctttcacccctgggtgggkatttttgggaaatggagccagtactctgcagtagttaaaacacrccaggcaggctgtgtcgtggctcacacctgtaatcccagcactttgggaggccaagatgcgaggatcgtttgaggccaggaatttgagaccagcgtggacaacatatagggagacactgtctctataaaaaaattaaaattagccaggtatggtggtgtacgcacttgtaggccctgcttttctggaggggctgaggtacaaggatcgcttgagcccagaaggtagggcctgccatcaaccatggttgcaccagtgtactccagcctgggtggcagagcaagaccctgtctcagcaacagaaaagccaggcagggcatggtgcactttctgtgccctctctgcattcctcgtcctagcacagtgaactaggtaaggggcccatttcacaggcagaaaagctgagtccaaggagaaaatgacaacagaaggaaggcacaggaggcttcctggggtcattgaggaagagtctgtgagaaaaacacaaatgaccaattctgttaggtgaccttccagaaattccctgggccaggtgtcgccccacatgtgttactgtatgcagtcctgctgacttctttctaaaaggtcagcaagacacacacacaaaaaaatgccacaagcaaaagtcaagatacttggagtcagtaagagagagaaaagttgccgggagctaggctcasgtcattcctcccctgaagtggaacgtggaaggggcwtgtgagactgrctgtcagtacagccctgggggtacctggccccacaggctggagtagggagctgggccggggctaccctatgcagaggcaggccctggggttgarcagcaagagcacctctttccaggcttttgaaccaatctaggcagttacttcaaccaggcaagtccgtcatgacctgaactcattctccatccccaaaagtggccccatagggcctggaggatgagcacagtcccctgagggcacctgggtcttgaggccggagcgccactgccctgcctccctctgtccagcacagtgtttctggtgacatcccactgtcacgggtgcagcctccttattggaaggcgcctaaagattcagtaggtgatgtgggcagttgtctcggcagtcacgaatggtcagccgtttttatgggtcctccccatggacgacgggagaggggagaggccaccaggctgcgcattacctgggtccccaccctcttcctcctctccagctctcctgacagttctctcctgcctgctcctgagggccaatgagaggcagtaaaaccgagatccggatctaaggcgttccatctgctccaattcgttaaggaaaagtagatgaccacaagcattggtgtgtcagccatgatcagtaacacgctacctaggaacccctgccccatcactgactgggacacctggtgtgtgttgatagtgcaggaagggggctcaggagactggcatgcacccatgccggcacctgcatagcttggccccggtgccaggttgaccagtggacttggggtggggcggggagggggggtggcagcacaggaacaatctgtaacccagaggtgacagtcttcgtcccctatatccccctgctcctgcaccaccccactctccctgcagaagagcaaatgggctttttcaggagccgtggatgacagagaggcattcttctgtgctccctgcaaggacacagcaccacagggccaccatctaaagactgaacctgcccatggaactggccaggactctgtgacacggaaagtggctgcctgagtccgtcgtccccttctccctcccaccattccttcccaggccctagaggaggtgctgggtcttgaggtagcaacagggacccaggtggaatccagaagcagagagaatctccaggagatcccaagaatccatagttcattttctcattcattcattcattcattcattcattgcacacagtgcacaaagccccgagatgagggagagacacagacagtcctgggtagtggaagtggcttggagaacagaagggtttttgtaatgcagcgtcatcagcgctgtcgggcattgcgatgccacgcgaacatagtatgtggagcagcttctgccttcaagaagcgggcaggtttcatagaggtggggacatttggtctgggtcctcagagatggataggagttcctgcgatggaaaagaggaaaggacattccttggagatcgtgtgcaagggaatggaacattcgggaaacaggtaaaaatgaacamcaccaaagaaaatagtgcgcagaggggaaggaaaggctgaaaaggtagaagatggtgagggagacgatgctgaggggtgaatcagggagaagggcctggggtggagcgggaatggggagaaggcccggggtggagtgggatggagagaaggacccggaatggaataggatcggggagaagggcctggggtggagcaggaatggggagaaggcccggggtggagtgggacgggaagaaggactcgggatggaataggatcggggagaagggcctggggtggagtgggatggggagaaggactcgggatagagtgggattcgggagaagggcctggggtggagagggacagggagaaggggccagggtggagtgggatcagggagaagggtctgcggcggagctaaactggacggggagaagggcccggggtgggttggatcggagagaaaggcctggggtgttctgattcggggccagggagaggccccctcctgggttaggggaggtgctggggcaggcccagatctcccaggctccctggtgaacagtcagggcagtgcactctttgaagatcgccaagcctgcagggccctggagggagatgtcatgattaacttaatgctgtcacttgtgccgcacacagcggggcccaccccgggggacagcgaaggagcagggsggctgcgaagcccactgaaatcaagacgtgaatctgaacagtggcggagggagacctcgcagaatgcatggagttgtccgaggggagtgacttgcaagtgaggcagcggacgaagggggaccaggaagacactagatgtgaccttccgtggtccctttccccttctttcgcacctagtctcttttttgtcctttccctcagttttggcggcgggtggggggatgggggagagtgctgggaaggacaaccgaagcctgcagattgacgccacgctcatcgcaggccggtggccgccacctctatccgccacccgacaggacccgtccatgaggtcccaggcccagggcggtgcagaggcgtgggtgggctgcggtttccctgctcgccttggaggtttttcttagtgaagtgtctgccatcttgtggctgaggctggtactgccgaggcccaccggcaaacctcccttccgggctccccaagggggtccctgggcctgcaggtggctgcgaagggaggaggaggaggggaggtgggcagtggcgctggcctccctgcgtggacccacttcctcccacgctgtgctcagagaatcttctggagaccgcagctgtgcctgggaggccatccttgtgcctaggaggacagggaagagggtggatctcagacacaggcaggctgggaggtctgcacaggtgtggccatagaacatggacgcctccagtacgcaggcacaggcagctcagggccgggagcgaggcccgtctcagcaggcggtgtcagccgcggagtgggtwggtcctctgaggacgatcacacctgtgggcaagagcacacccgggctctgggccaagtaagcctgtgaatcccactggcgttgtgaacccggagcccttgggatccgattttttatttgctatttggatacagctgtaagagatgacagattattttacatccctcagttctccgaacttgccttggaccagraatgtcaggccctcaccgtgcctttttctcttctccaaactctctggtgctgcctggagcagatggcaccccccacagacgtcgtccttattgttgtcaccagaatattccatttccacagccacctggcatcccaaagccttccttcagtgggcagcctcttcacaggcaaatgmtagcgatggttcaagtcacacggccagcacatactccatttccaaggaggtcattgctaactctaaatctacccctgttagttagccaaccccacgtgctcattcttagagaggttctgttcccwgaaaacagtctggagccaaatgctgtgtgagctrgggcccggtcatggaaacagaaaacttccattccgtcaagctggatggattctacagaaggaattcggtgtttacagaatcgttagcagggctgttcgcgtgaaggtcagggaaaagcaccccaagatttcaggataccaagaagttactgaaattgccaaaagtcattgctgatggcattccacggactctctggagagggccaggaggagctggcagagtcttgggtctgcttcctgcagagtcctgcgctcatcctcacagctgcgccctgcaaagaatagcttctccttttacgtagcctgccaaatttcgtgtgagtttctctgattggtggaatctgaagcagggccttgctggcagcagaatctggggaatgcagtctgcgagctttccgcctgtgcggtacgagggtgagctgagaatgtcagggaccaaggcacagtatctgatacacacttttaaatatgggtgataataataggacttccttcccgtggctgttgtgaggctaaaattaacatgtgtgaagtctttgcacagatcatggcatatggtagaccctcaataattgctagtttacaaaaaattgtcaaaactgacattagaatggctcctcattctcattcctaacccctgcaagaaaactggctgcctctgagctggctggtctaacccacccgtcttggcggggaccctgccccttgtcgttccggacctgctgggcctcaagatcctcgatcggccttctgctggctcagacggcgaaacagagatgcaggaaataagtgacgttgctcaagaaaaacctgacgcagtgaatcatgctgaatattaatattggatgcactgtgcttggcagacttgaagacttcatctcacatggaccagtggacagtcagagtgtggttggtcccctcgtgaaaacatgggtcctggctctgctttgcagctctttactgaatggaggcagtgagagtgggttgagcctctgtggccgtgtgctcacatgcttcaagcagcctgcaacaggaaagaattagggcacagctgaaatccaaaggggagaagaagcaggctgaaatccacrgggagcaatgtctatttcttagtctgtctcctgccccaaatagcccctctctcctttcccagcttgtgttgatgcgtgtctttccctggcagcagatgtcaccgggacgtaaactaggacgcagagggtggtgatgagccacaggccacatcctgccctgccctgactccccaggctccctggcctggagttcagagtacagaccccaagcgaccgcctgctcaccaggacgtgccagcagggtccttctcccsagagccacagcgagtgaggggacactctgtctatcctgggagtgggctggggtcctgttcctgagctggtgggcagatgcgatagtgccaggtagagctgcagccattctgtccatccctaccctgtccacccgtttcattccctcccactgtggccctgctgagccctctcagggacatccatttaccctcggggacagccagggagccatgcttacctgctgtttcccctgggagagctttggggccagtttcaaacagacccacagcgtccaaaccagggcccccaacatgcacttgggatggcaggggtgtgggggtagagtgtaagttactgatttaaaaatctgatataaacctgatttcagttcccagtcaactgaggcacagcaaggtaagtccctgcccagygtcactccacttggaatgcggagagcccggcctaaaggggacccactgcacatcccaagccacgcgtctgctcactgcagccctggcccctcagtgccacccctcgcaggtgctgtctctctagcatgggagctgatggcgcctktctgtgtccccacaggttctttcagagcacggcttcggccccatcactaccgacatccgggagggacagactttctactatgcggaagactaccaccagcagtacctgagcaagaaccccaatggctactgcggccttgggggcaccggcgtgtcctgcccagtgggyattaaaaaataattkctccccacatggtgggcctttgaggttccagtaaaaatgctttcaacaaattgggcaatgcttgtgtgattcacaatcgtggcatttaaagtgcacaaagtacaaaggaatttatacagattgggtttaccgaagtataatctataggaggcgygatggcaagttgataaaatgtgacttatctcctaataagttatggtgggagtggagctgtgcggtttcctrtgtcttctggggtctgagtgaagatagcagggatgctgtgttyacccttcttggtagaagctaaggtgtgagctgggaggttgctggacaggatgggggaccccagaagtcctttatctgtgctctctgcccgccagtgccttacaatttgcaaacgtgtatagcctcagtgactcattcgctgaaatccttcgctttaccaaatctagacawacataagggrctttctctcccttttcagccctctctgtgcagagaaaagatgtgagtccgcttgatgaattctaatgctttgcttagagctatgagaaatgtttgttttaataaaaacctacagtccaataatgccaactgcctgacatctcctctgtctttggcttgcttaggtagaatatttttaagtgctgtaagatgaatttaagagctctaaacagcttgggagggaaaaagcctcagagccgtttacctccaaatgggaacaattcggatgaaatttttggtaaacatgcacacctctagctccttgcaacctaagtaatagtagttgttctccaggtgcctgtcgcatccctcacgtcacaggctgttctagttatagcagaccccttcaatccctgcccttaagaacctttacattccagacaaggagtcataaacatggaaagaaatgatgaaataagatgatgtcaggttctgatgagggatgcgaagatgatgaatgggctagggcagtcagttgcgtctgggggctgtgagatcgtgttcaggggtgttttagcgaggttggtcacggaggccttcgcaaggtggtgagacctgatgtgttagtcccttctcacgttgctataaagaactgcccgagactgggcaattgataaagaagagaggtgtgattggttcacagttccacaggctctacaggaagcatgattctggcatctgcttggtttctgggtaggcctcaggaaacttagaattatgatggaagcgggagggggatcaagtcggggtgccacatacttttaaaccgtgagatctcaggagacctccttcaggagaacagcactgagggatggtgctgaaccctgagaagccgcccccatggtccagtcccctcccaccaggccccacctccaatactggggattacaattcgacaggagatttaggggggaacacagatccaaaccatatcacttgagaacgaaatgaactaaatcagtagtccccagcctttttggcaccggggaccagtctcatgaaagacgattttcccacaagtgggtggtgggaggaagggggatgtttttggaatgattccagcacatcacacttattgtgcactttattattattacattgtaatatataatgaaataagtatacaacttatcatcatgtagaaacagtgggagccctgagcttgttttcctgcaactagatggtcccatctgggggcaatgggagacagtgacagatcatcaggcattggattatcataaggagcatacagcccagatccctcacatgcaccgttcacaatagggttcacactcctatgagaatctaatgccaccactgatctgacaggaggtggagctcaggaggtaatgtgagcaatagggagcggttgtaaatacaaatgaagcttcgcttacttgcctgccactcacctcctgctgtgaggcctggttcctagcaggccaccgaccagtaccagtccgtggcccagtggttggggactcctgaactaaatgatgcaggacctaaaggaggaagcatgttgggaatacactagtggaagtggaagctattccatcagtagagagaaccctcagtgaggcaggtggaaccaggtcacagagagccttctataggatgacataatgggctttttagtttattctatttaattgggcagcattggagctttttacacactttctccctcatttatttttaaccggagcaactggttggctgggggtatgatttgcttgtaggaaggtggatgtgaggtagaggtaatgggatgaattgtgcagttttggccacacaaatttgagatgctcctcggatgtcccggtggggatatggagcagggcagttggttgcatgggtctggatcttggaagggatcagaggaggagaaatttcagaatccccagcatatagatggcgtttgaggccacgggaccagctgatatcatttagggagagaccggagagagagaaagggtttgaacattgagtgccggggtgttctgacatgcagaggtctgggaaagaaggagcaaaggaattggaggagtgacccctgaggtaggcacaggcagcgagtgtgtctgtcctacaagcaagttgcttgtagagtctggggaaaagcttaggccaacttccatgttcaaagcagagcgaactaaaactgacggggcgtccagcccttcgaggagggatcttgcagtgtttcaagtgccacatcccttgaatcttgcgctaagccttccccagaaggaaccgggatcttttaccaaggtgactctgtactggtgaaatggaaatagcccaggccttctaggagttattacccactgctcctaaacgtgaaagaccaaggtccactgcagagtggggtttatgaagaccaggtgacagatgggatcttgctccaagtctgtctctcagtgggtccggtgggtcagaacaagcctgaagttatttcctcactcccagaatgcgtagtgtgtattagccatgattccagcttctgcagcttgatctgtcagtatccattcaccccacgcgcatatgcccctgacctcctgcctgccccctcacccctgcttctcactgggaggagtctttctcttaggggtgcaggtttatttttgtttttgtttttttttttttttgagatagagttttgctcttgttgcccagcatagagtgcagtggtgcgatttcggctcactgcaacctctgcttcccgggttcaagcgattctcctgcctcagcctcccgagtagctggtattacaggcatgcaccaccatgtccagctaattttgtattttttgtagagacagggtttctccatgttggtcaggctggtctcgaactcccaacctcaggtgattcacccacctcggcctcccaaagttttaggattactggtgtgagccactgcacccggcaagggtgcagttttttaaatacaaaccaattgatccagagttcacagcccaaccacctcctctgtctggctctcacactccaggccgctctccagctttcctaagtgccccaggccaagtgcttgacagctagggacagcccctgtgccccagagctgctgaaatttttcacacgcgcctgtcctgagcctgttcattctgccattccttcccatggaaaccacagtagaggctctgtccacagtttccacccccctctgctccagttcttccgcttctcttgggacctgtgaataacaaactgttaacagcagccatctctaggtctgttggccttattagacctaaataacaatacaacctattaaaacatcatgagatagatatacctaataactgacaaaatcgccattttagctccctgatccatggagtaaagtctcctggactccccctctcccgatatagtgaataaaacaataccttctcttggggaatttcaaattttggtggcaccagtggcaaacccaaatgatgcaggggtgggcattgctgcctgaccctatgttgtcaccctgtttggcagatgaaatactgtttctgtctcccagtgttgtgtcatgcgtgggtttcattcacatgttctcaatgtgttcttgaaaatcattatggaaaatacttaatgagccgggcctgggcatggtggctcgcacctgtaatcccagcactttgggaggccgaggcgggcggatcacctgaggtcaggagttcgagaccagcctggccaacatggtgaaaccccgtctctactaaaaatacaaaaaaattatccaggtgtggtggttggcacctgtaatcccagctactcaggatgctgaggcaggagaatcacttgaacctgggaggcagaggttgcagcgagccaatattgcaccactgcactccagcctgggcaacaagagcgagactccatctcaagaaaaataaataaacaaaaattgaactggacagttcacttagggacatgttgcttgtttaacgtcttagagcttctgttgtgatggccatgacgtgtcattctactgcccctgttgaccctgccacccccaacttctagcagaaagtgctggtagattgccacgctctttcctgccaagcccaggcacactttcagaattcctctacaccaaggaccttgggaaggccctgccaacctatcagacttggtttccaggtgagacccagagctttccttccaggtgaaaccagaattgctgactaaagctttggatgtaatgtctcagccgggggtaagttcaccgaagagatgtcatctaaagaacagggtatcatgatgttagccacagcatggtgatcagagagcctggaacaggtgctttgctgaaatctggaaattccacagaggctggtggagcgatcagctggagtgaagtgagacagacctgagggaaaatgctagctctgcctcttatagattgagtgaccctgcagaagtcacatgatcattctgaggctcagtttctttgtgtgtaaaacagcgataatcatacccatgttgcaggacttggggaagattaaatactatgcatacacacacatatatatgtgtgtgtgtgtgtgtatatgtatgtatgtatgtatatactttgtacagagcctgagatacagtaagtgttctctacatggtagatattattattgtcttcttgtaaaggagagaaggggattatttgctgagaactttaaaaaaatctcattcgcttttgtgagtccaccctgtccctggaatgatgagtgacattttctaaacattattagtttgtctgaatagtttataaaatttccagggaacaacattttttaacaatatgttgactctgagatgtcctttctgccccccaaattttaaatatttccatcagagaacaggctacacgttctttggaatgtgctctgagttccagctgggacattgggatactgggatgccaagaacgtgtctgcctgatgtcagcagtgggctcgaggcaaatgtccctgagcacccactagtcacttagtcggtgcatcttcacagaagatgacatctctgtgggcccctctcctcccctgctgtacagtggctcttctgcgaccaagtggcccccttggaggtggaagcaaaaggaaaggctctggacggaggttccccagctccttgataacgtgtaaaratctctggcaagtcagaggagttcattgctcacattaagagctgcttctcattgctctcttattcattcagccattagttaattaattctctcaacatgaatctattcggtcccggctgtgtgccagggtctgtgctagatgccgggggcatcatgtcagccaaacatggttgccagcctccataaaactgttctagtggggaaattagatattaaacgagcagtgtcacaactccataattaaaaacagtggatgagctttcagggaaaatcatagtgtgctgtgaaagagtaaaaatgaggggatccgatcaaagctgagggagctgcatttgggctgaattctgcaagatccatgagaagtaacacgcaaagtgggtgcgaaggtacagttgggagagggacacgttccagggagagggacattttccaggcagaggcatgtgccaaggccccagggtggagccattgaaagaaggaacctaagagctgtggtgatagtgccatatgtgttcatgctgcttttgtttttacaaagacttaactttttagggcagttttaggttcacagcaaaattgagaggaagatacagaaatwtccatatgccccccatgccctcacatgcacaagctccccaactatcaccatcccccaccagagtggtgcatttgttacaaatgatgaaccaaattgacacgtcattatcacccagagtccatagtttacattcgggtttgttcttggtgttatacagcctatgggtttggactctatccactgttagagtatcatagagaatagtttccctgaccaaaaaattctctgtgctccatccacctgttcattcctgtctccctcctgacccctggcaaccactgatcttttaactgtcttcatacttttgccttttccagaatgtcagat

SEQ ID NO: 94045 - DNA, 96719 bp, Homo sapiens
gctggtcttggcactccactgactgccattctcccatcactttctctccttgggcgtctctattcccagagacacaacaatgtcgaaattaggccaatttaataactctacaaagccctctacctgttcaagagaaagagtcacacatctcttattttaaatcaaaagctagaaatgattaaacatcgtgagaaagtcatggtgaaagttgagacaggctgaaagctaggcctcttgtgcccaacagttagcaaagttgcaaatgcaagaaatgttcttgaaggaaattaaaagtgctacttcagtgaacacacggatgctaagaaagtgaaatagccttattgatgatatggagaaagttttagctatctgggtagaagaccaaatcagccacaacattcctttaagccaaagcccaattcagagtgaggccctaactcttttcaattctttgaagactgagagagatgaagaagtagtagaagaaaagtctgaagctagcagaggttgattcatgagggttaaggaaagaagccatctccataacacagaagtgaagatgaggcagtgagtgctgatggagaagcggcagtaagttttctgaaaggtctagctaagataactgatgaaggtgactacactaaacaatacatttttttttctttcttttcttttcttttttttttttctttctttgagacagggtctcactctgcctcccaggctgggtgcagtggcaggatctcagcttactgcaatctcagcctcctgggttcaagtgattctcccagctcagcctctggagtagctgagattataggcatgtgccaccacgcttggcgaatttttgtattttttggtagagatgggtttcactgtgttggccaggctggtctcaaactcctgacttcaagtgatctgcctaccttggcttccgaaagtgctgagattataggcatgagccaccacactaggccaataaattttcaatgtagaccaaacatccttatagtagaagaggacaagtcgatgcctggctttaaagcttcaaaggataggctcactcttgtttttgtttgtttttacaagatggggtcttgccgtcttgcccaggctggtctcaaactcctgcactcaagtgatcctcccacctcagcctcccaaggtgctgggattacaggcatgagccattgtgcctggcccaaggataggctaactatcctagcagatgctaatgcagctggtgactttaagttgaagccagtgctcatttaccattccaaatgtcccaggacccttaagaattatgcacaatctactctgtctatactccctagatggaataataatgtctggacaacagtacatctgtttgcagcatggtttactgaatattttaagtccagggctgagacttactgctaagaaaaaaaaattctttcaaaatattactgctcattaacaacgcacctagtgacccaagagctctgatggaaatgtataatgaaatgaatgttgttttcatgtctgctaacacaacatccattccgtatgtcatagatcaaggagtaactgaatttcaatcttattacttgagaaatacctttcttgaggctataggtgccatagatagtgattcctctgatgaatctgggcaaagtaaattgaaaaccttctggaaataattcaccattctaaatgctgttaagaatatttgtgattcatgagagaaggtcaaaatatcaacattgacaggagtttggaagaagctgattcaaaccctcatggatgactttgagaggttcaagacttcaatggaggaagtaactgcagatgtggtggaagcagcaagtgaactacaattagaagtggagcctgaagatgtgactgaattgttgcaatctcataataaaatttacatgaataaggtgttgcttcttatggatgaacaaagcaagtggtttcttgaaatggaatttactggtgaagatgctgtgaatattgtagaaatgacaacaaaggattcagcatattacataaacttagttgataaagcaggagcagggttgggaaaatttattccaattttgaaagaagttcttttattggtaaaatactattaaacagcatcatgggttatagagtaatctttcatgaaaggaaaccaaatgatgtgtcaaactattgttcttattttaagaagttgccacagccacctcaaccttcagtgaccaccatcctgattagtcagcagccatccacattgaggcaagaccctccacagcaaaaagactgactcactgaagactcagatgattgttagcatttttaaacaataaggtatttttaaattaaggtgtgtacattttttagacataatgcaattgcacacacacttatagactgtaatattgtgtaaacataacttttttttttttttagatagggtctccttctgtcagtgaggctggagtgcagtggcatgatcttaacatactacagcctcgacctcttgggctcaaatgatccccccacctcagcctcctgagtagcggggactataggtgcaccccaccatgcttggctaatttttttgtattttttatggtgacaagttttgccatgttgcccaggctggtctcaaacttctggcctcaagtgatcctctcaccttggcctcccaaagtgctgggattacaggtgtgagccactgtacatggcctaagcataagttttatacgcactggaaaaccaaaaaatccatgtgattcgctttattttgatattcactttatcatggtggtctggaaccacacctgcaatatcttcaaggtgtgcctgtaccataatttcaataaaatgtgatttaacccagcattatctttctctgctattgatgcatgatgtcaaatttaccttatctgaaacctggtgaatgttttgaggaatggagtgaatatttagaactggccatctcacataataaatgcttgataaatgggtttcttgactttaaaaaaatgtctgactagtgttcaatggagttggaagtatttgctaacattattacttacacaggttacttaatcaaattttaaacattgtcaaacatatcttgtatgtaactgtgggtttttaaaaatgagtgttgatatgataattcacaggtttcctaataaaatttagacactgtcaaacacattgggcgtggaactgtcgcttttctgaaatgagtgtcacaggaacactgcattgtctcataccagtttattttctttagctcctatggcattccaatgctctttgagtaacacctttattgtcctaggataaggaagaatttaagagagctttccagaaccctatttcattgtttttaataaattctttcccacttttggccctctgtaagcaagttctctgctacaaatagattaaatgcgttgacttcatctgctatagtgactcagatttcttgacctgatctattctgcagatctagtttttgaatcagaagttaggtaatgccttctcctgggttttaattatatgcgttcagtatcttgggtaagaaagttaactcttttgtctttttgagctgtatcacttatacctttttttttctcctgtccaaaaaggggggaatatgtcctaataacgtctttgatacgcccaaaatagccagcttctctgggatgtaagcaacaagatatttggtttgggacatttccaaattccacaaccttttttttttttttttttttttttttttttttgtgagacagagtctcgctctatcatccaggctagagtgcagttgtgagatcttggctcactgcaacctttgcctccagggttcaagagattctcctgccccagcctccctagtagctgggactacaggcatgcaccaacatgcccgggttatttttgtatttttagtagagacagggtttcaccatattcggcaggctggtctcgaactcctgacctcaggtgatccacccacctcggcctcccaaagtgctgggattataggcattagccactgcgcctggccagattccccatactttgaactccctacttcttctgaggccaacctcaggcctaccacataagtcctcctctatagtgtccgttgaagtgccagactcatacgaagctcccaaactcatgttgaagaggagattttagctaaatggaaatgtgctatggcaattattctaccagtgtccttgatacaacaaacaaatcagtaaatcaaagttgtaaagagcctggctatgaaacaggatactcagtatgtattttattatttatttatttatttatttacttattttgagaaggaatcttgctcttgttgcccaggctggagtgcagtggcacaatcttggctcactgcaacctccacctcccaggttcaagcgattcttctgcctaagcctcccaagtaactgggattacaggcacctgccactatgcccggctaatttttgtatttttagtacagacagggtttcaccatgttggccaggctggtctcaaactcgtgaccacaggtgatctgactgccttggcctcccaaattgctgggattacagacctgagccaccgtgcctggccttttattaattaagatgaatgctaatacaaactgtgctatgggacatttatagggtagctaccatttaaagaaaaagaattctcttacttgagactggtggaaggcatggcagataggactttggcaaagaatagtggaaagaaagttgaagactgcggggaaacacaagtctgtggatacacaggttgatacagtctctcttagagggcatgaatgggcaggaaggactttaacacttacttagtacctaccctatgctaggggctggggtaagcactttgcagacatcatcttttaaaaagttccttaagaatccctcaatccttcttctatagtctccagctcaatgatgttaagtgattcctccatgccactaaattggaaagtggtgggaactcacattcaaacccaggtctgaccaacttcaaasgccaggaggctgtttccttcattccatggctgctccctcaagagtaactgtgcatggggataagagtaactcttttccaaggttgatcaaggtctctttcaataccgagattctgggacacagattagaagacacagaagaatggcccagccttttccacccaaagacctgttactgaattttgtctccatgtgtctgaagggtacttccccatcatcattttcattcatcctaagaaaggcggctccctgtgtggaggtggtggccgcgaacattttggctgaactgagcagtcaaccttctcatttttgctggaaggatttgagagaatatgggggagatggtacacgagccagtggaggattagtggggttttatgttgttgtgatgaactttatgatgttagtttgtggtttcacatagcctcataaaacaagctggatggtgattatgtcacttcctctgccctcccgacagagaggaggccttctttagtgcctggagtgtttcctgatgctccactcaggccagctcacttttcagattttaatgtaagaggtgtggagaagaaaagaagaagaaggggtgggggaaagccatcggcccaagtagtcacactgtcatcctggctgacaaatgactgatgtcagagcatggtaccgaaacgtatagaaacaggcctgttggcttgggcaatacataaatgagccagtcacacatttctcggatggctggcaaaagttttgttgtcaaagcaacgcccccatcgagcttgctttgcttacgcaaggcctcagcctttgcctcttccccaaacccaagctacctgaggaggaggagctgagtgagggggagggaccaacagatttgtcccctgtgcaggctacctgcctgcttgagttacatccacaaatgcctcggaagcagccagctggctgcatctttctcctcacattcctgggtctgtctgggctggttggcacagttaccagaacgtactacattgggattgtggaagaatactggaactatgtaccccaagggaagaatgttattactgggaaaagtttcacagaagacaagtgagtgaacttagggtcctcattgactcccaggtttggcctctttttgactttgtgtggggaaggttgtatttcttgggtacttacaatgggggtgagttgatctagaccaagagaaggtgttttgttttttgcttgaagagccctagtatggatgggtgtgtaatctggaagagatattcatagctccatgtatttgttgagccacctattaatagccttgcctgtgaagggacatatacacaaccaggtgtttgacaatttccaccaggtactactagtaacttctgggggattctgtttgtttgtttgtttttaaatgacaacacttgggatgaagatttgagaaatttcaagaattccttatggttaaaacacagtgttttcttagtttgtatttctggaatgaaacatcataatgggagataagtatgctaagtcatgtttttcaacgtttaaaagagggggaagtcacaggagatttgcctgctattttcagggtttccttgagtctacttagaattagckctttcactggtaaaaagtttattccagctccaagtcattcttgctgagggcaatatcttatcccagaacctatagcatagctaggtgagatggcgccacggtgttctatgttcctgatttttaatttggggcagaaaataaccctttctccctgccccctccagggcctagtatcttaaccatctaatttgtttcatggatctccctctgaagtcacctcctgactccagaagatgtcatgctattttcaactttgtggttattagaacatcttttcagatgttttggcaacctctgttggatatttgaatgcttgcttcttttctgacaggcagaaccagttgcattctgcatccatgttccatttcctaaagatgagtttagttgataaaaytcaggaacagcacagggcctaccagcaagtctttaagagccagggccccttgtctttgaggaaagaccaaagatccagttggcttggaaatacagcttccaagttttctaacaaaacaaaggtggtatagtcatgttttgtttaccaaagatgaagcctgtgccagacaagctgccaaggcagacttttccttaagctttgtacctggaaatgtaatgtctgcagggctatttccaaaggaaactcttgattgctttcaatcccacatctgctgaccattggtggtagtgtctttactgtgatgaatagctatgggattgaaagggtaccaaaaatgccaggagccttctctacaaatagagctctgctattctcagagagggctcagtaggaaacagtcaatgtgagcagctactggggataagaatgttgaaagtgtgtacactgagtgtaatgaatatagcgtttaagctaaatgtgatactggattgcctttccataagattaacacccacagaaattcttcttcctaaaatgcccacgtcactatagctgtgtatgggcatttattctgacccaaaaattctatgagggatttttcaattcattactgcttgcagatattattattctcattttatgaaccaggaaccaaggctctgaggttaaatacttgccggagtttataagtaagtggtagcaccaaactcattgctttggttccacagcccatatttcttttcaccacacaatctgtttcttggtaaaggtgatccttctccagtgaattaaaacaactttgagggaagccaaggatcacagtaataagaactttctagaaagtcctaatttttgccaaaggcatgtttagtctcttttgtcactcttcctagaagcatattgaaagggatcactggtggtcagtgaccaaacaagttatctgggttaattcaaaacctcaaagaatcataaatactcaagtactacaatgctgttttcacaaagtggggtgctggaagaagttggggtctctgttgatcatttcaaccagaagatggtgctttgatgaaagtacaataaaacatataaaaattgctatggtgaaaaagaaaataggcatgatgaaaacagttggtttggcatcagatttgagtgagatggtttcaaaatgcatggtcccatatgatagtgcgtttgttcttagaagcagctggcatgctaargtgtcatacctagaacgccaaggtccccaaacatttctttctggtatgcgaagggacagagtttgtgtcagacagactgctacctcttggaagggaaatccaggtgagtatgcagtggacgttggcttttatcagtgatcccatcagaatactggtttttatcagtgatcccatcagtgctagtagttgtggtaggtggctcagacaagttcctaaaaaggtagggctgtcgtaggtggctgacattgcttgtggaccacaagatatccatcctgggtgtatgtgaagatgctgtgactgggacataagtggagttcagtgtgtgtactctgtgttgtgccatttccccaggagcaggaaggagccatcgtggatgatgtaatcatgyccctctctcagcctcctggagggtgaataggctgcctttctgaggacagtctgttgttttggatattcacacttgggcaaatgtctgatatttaaaggaccaggagagccaggtgctcagaattccaccatgaatggaaagaacctgaaatagaaatycagagacctaacttctaatgcttgctctgcccaacttgctgtgtaatcttgaacatgtcatataatctctctgaatatcactttccttaatttgtgtaagaagggagttgaaatgtaatccctagagtcacttgagaagtgtaatgccaaagcattagaaataattttgaaactgaatgaaaaatatctttcctgacttgccagttctagaaagatttttgcaatggtgaaagaaaggagagagatgatttgcaaatgttcagtcctagaaattagagttggagaagacctgggactgatcgtgggcatatgtgacaacttttgaagtagtctttatttttctttctccattttttcccctgtcctttaagaattatctccaattcctcacttcatacaygaagctttcccccatgaccctggcttgtactgatctgtttccttcctaaccactcatggagcttggggtctttatcatgaacttggacactgcattttcttccctctgcattgccctctaattgcttgatgtacattagtcatgtctgcaactgcagtaaaacaccctgatgatagataagaagttttggcgtatattcaataatcccccttccctgcacggaactttgtcattgacaatatcctatggaggatccagtacagggcaggcattcaaaatcattgaagtaaaagctaatcaccttatcaactgagttgttctggttgttttatctttgaataaggggaatgggcaaaaatctggggaacaagatggtgggtgccaaagtttcagtaatgtgaaaacatttggaaaccaaagttaggcacatccttatgcacaaggacgagatcgaaaatgaattgaaatcattttgctgagactctatagccctcagatggtgcaawttaacttttatgcttggtacctatgcttgattatagggttcaaaaatataattgagtctataatcactaatgtttcctagaaagtataggatttaggagttagattctatttagaaatactttctccagataaatatacttctcctcctccttggagtaaatggggacactgggctcctttgagttgcctgrggatggtgtcagtattttgatctatttataccagtcctgctcaggctcataaagtccttaattaaggtgtgygtttggtggtaaagcctgatccttaatggaagtagggtggggtcatcttatttaaagccacagttctcaccatagacctcattaggccatcaacacacattcagcctttttcttcccagtgaaatgcagggttttcatggacrctaactcatgggtggaactgcgcttgaacataagtgaggctagccactgctcaaaccccatttttgtagagtctgttagttgacccagccacatcactgcatcagcccagtgtatggcaaggggctttgagtattctaagaagcaggccctaggataggtgtgagagagaactcacacatctatctgaaagaaggaccaactgaggggaagcagggaggagacagaggtttttgtgagctttgaaataaagaaaagaatatcatctggtaagtgcatggtctaaacaaatggtaactttcaaatctcaacttctgtcttatcagcaccaaaaatattttgtttggactgatgccatatgaatctctgggaactgctgttctaccctatatcagtaagtgattgtttctggctgccactagagactggagtataatgtctttaacaaattaggattttgtattcatttgtagaagaatccagaagtgggcagtccaaggctggtgggatagatggtataacaagatatcaggggctttctgtatttctgatccaccatccttagcctatgtgctttaaaccctttgtggtttccctcctcaagcacattcatggtcacaagattgctgttggatctccagccatcgtgtctacattccaggaagaaagagagaaaggcaaaaggtagaagcagaacaatttttgctgcatcagcctttcaaagggttctcattgaaaccctacccaaccaattttacttaaatctcattggatactcatagccacaaagaggacttgaaaaaatataacgtttcagctgtgtacttttctgcctgaataaagatagaatttacctctgacactaagaaagaaggggagcatgaatattgcaaggcagctggcagtccctgctcccctcccctacctcagttctctcctgttttccatgattcacaggcatcctcttagtccccatcttgcttttcccacctccatatgatggrcccccaaggcctggttagcaggatctgaaagataactcattgacagtataataagttagctaagtgtcactgagtatttactatgctccaggcattgctttaaaaggttagcacaccatgaagtggggtgaccaatcttctgtctctgggagggagatcaggtggcatcgggaggatttctccagccaagtgtagcccagccttggtcttagggagatgccaaggcagtccagtttgctggtaaagtatggggctctggcatcaactgtcacatttagaattcttgccccactttatgggcaagtaattcaatctctctttgcctcagttttctcatcagtaaaatagggatagtgacagtacttgctttgagggtgtatcagttttctgtggctgctgtaacaagttacaaactaggtggcttcaaacaacagcaatttattctcccccagttttggaggccagatgtctgaactgcatgtgttgtcagggccacaatgcctctggaggttctaagggaggggccattccttgactcttccaggttctggtatctgccagcattccttggctgtggctgcatcactctgatctctgcctccattttcatatcgtcgtcttctctctgtgtgtctagcctatctttgcctcttacttataaggatgcttttgatggtgtttagggcccacccagctaatccaggatgatctccccatctcaagatccttaacttaatcacatctgcaaagacccatttttccaataagtttctgtggatgaggactgcggagttayctttgggacttaggatctgcacatactcagacacagtgcctgccacttgagagcacttgatcagctctcgtggtagctctgccgtctcacggggttctttggagagcrggagccctgggggaaagaccttggctggtcacattttcctcttttctaacaaagctttacgctttaccagaaataatcataactgtcattgattcagcaccactctcccagttgctgtgtgtgtggctctacacctcttctcattgaatccttatgatagctctaccatggtcactgctttacagcagaggaaactggttcagagaggttaagtctcttccccatttcacaaccagcaagtgagagagttgggattcaagctcattttcattccccctcatcatgccatttgttttgaacacaccttgtatatgaagggcttctgtggaaatgaagagtgaaaaggaaggacccaagacataggtggtgccagggacccagagtgaaagaatgtatatagaagcacatccagatggtattaaaaattattaatctaatagggagggtgcagcttcaccaaactgaatgtgcaatctccgtctccacccttcctttttccaagtgacatttgtctcaatctcatctttttttctccttggtgaagaacgttccttctcaagctcaaacaatatttcttgtccttattgtgactcttatgatctcacatgttggatctgaccacamtctctgctaacattattttgcagtttatcttcatcttatatttccctgccctctacacagacatgtgggctctggacagtagagttggcagttaacattgtaaaactgtgtttactgtsaaatgcatgttttgcttcccaactagatggtaaaactcttgcatgcagggactgagattaatacatcttggccccagtttctagttttatgtcccagacatagtagatgatcagcaattgctccaaggaagctatcagaaaacatccctctaaaagatgcagaggtcatgggattgctgggtggtttatatccctgcaagctacgaactcctgagaatctaacctggaagtccaactctgtactgtgtaggggattcccaagggcaggtttgttctgataatgattaatctcctctgcttttggaagatatctccatccacaggattggccccaggcactggcaatgtaatgttccaagtccccatcttgtctttaaggcagttgttaatgttaaccttcctggccccactggattcttttgcagcaggaagtagacacctccttagcttgagtcaagatgttagaatgcagattgaaaatgttcttgaggaatagtgattgctcagcccctcgccatggctacgtgataaacaacagatggctcaccaatgcaacattctaacaaatatactccatttaaattggaggttgcttcatggggatggctcccttgaagttacttccttactttgtttcttgggcaaatttgcattttatagaactcaaaggagctggagtttctgttctactattacaaatgcataatatgttctcaatgggtggtttgctgtgtagacactaaaacaaactactttctcttatttctatcccttcccacttctttttttactttcaagctttttttcctattagttaaaaaagtataggatctcactgtattgcccaggctagtcttaaactcctagcctcaagtgatcctcccaccttggcctcccaaaatgctgggattaggcatgagccaccacacccagcctyaacaaatttttatcaaatagttactatagtttttgttttgtgtgaagtatcttcctagggcaccttcatgggtcaaccctgtcctactcttgatgtggagtcagtgcaggggaagaagtcctgggacaaggaggaagctatgggttctcttcactgtctgagcaggaggctcctcctgcagcagaggaagagagggtcttgcaataataattaaatgcccccacccagaagtgacacgtggcatttccactcacagccaatttgccagaacactatggcccatctaacttgcaaaagcagaatcactgtggtcttctttggttaggaggaaagaaaaattagaatacgcaagccctaaaaagctctactacaggaatcatttggtgatcttaggaaaaaatacagataccatggtcttgccagtagaaagtctgattccattgccctgaagtggggcctgagaataaaaatttggcaaatgttccaaatgattctgatgcaagtggtacatgggtggacatttgggaaccactgctttagaaaacccaatccccccttggggtgactattggctgtataggtgataagactgatatgtgtccaggaatatgaaaaacagtcaatgtataactcagtgccaaaatatgaagcataccataagtgctccagtccctacagggactcagcaaacacttcactgcccctcctgatacttattttgcctcttatttagtgcctttgcmagacaactcatggtaagacctggtcttgtggaggtgatggagaaaggtcttgggcagaggtggggtcaggacctcttagcagattaaaagcaggagtacatatgtgaagatgtgagcatgtgtgctccacatgcatctgcatgtgtgtatacttttgtgtcttcatgtgtgcagtgggagaacagggtagagaagtagagtccaatgtccatccttccctatagggcctgttggaatgataaggtcctatgaataatagttttgtattatagtttttacccatcaggctgaacccagagagcataccagggattctgaatctaatccttgctgtgccaccttactgggtgacccattgtcagctataaaactgggcaactctgaggcttattagcaagcttggggatgactcagttcttcctctgcctcttcctcttccttctccttttgcacagcctgttcaatcaggagttgtattcagctactctttaacagaatcctgaaaaacagaagtggtttaaatcgattaaagatttattattattgcttacataaaagagagccagaggttggcaatcatctgggtcccaggttccttttggctctcacttgaccattcctagggtgtgaccctcttcctcgttatctcaagatggctgctggagctccagtcatcatgtctacatttcaggcatgaataaagggaagagaagaggagaaaaatggtgtcttccagctacacctggagaagtatcattgagtgacttctgcttacatctgattggctagaattatgtcacatgactattccaagttgcaagcaagtctgagaaatgtaacagcctctattataaaggtccaggggtcaggcatcccaacttttatatcccattctcttgcacagggaaatgtaagtctttgccttatagagtgggagagggctaactcttgctcctgggtagacacatgcaggcttagtggatgcttggatacaagagacccagaatgttcatacacagtcccaagacttcagcctcaatgcctgagaggagagttggcaagccagaggttgagcagggatagtgagcagatgccatgctctctgctccagagrccaatccccttgcagagcagaactcaatccaacaacaccctttgttgtggcagctttgtttttagaaatagaaggcatgcaagagaattttggccccttggaggccaaacagcatgggtcttctttttttttcaataaaacgtgagcttgtttttagtattgaatttgtaggtacagagtaaccgcccctccccctacaacagtataaaagaggatgagtgaaagtaaacttctcctccgtcctccctcccacctgtggcttcagtctcatagtctggaggctacactttgtttccctggtcactttccagatgtattctttgcatatgggtaaatgtgcattgttmcacacacacacacacacacacacacacacacacacaaatgggataatactttacatacggctctgcaatttgctttttttttattagtatcttggtgatcacgccatatcagcacctgtagaccaccttattcttttcttatgggtatgtggcatgaatgccatcatttatttacccagctgccagttgaagaacattttggtctttccaggcttttgctatcaaaatcattctctaattttttaaacaggattcctctcttgatcacattgtttggattggaagctgaacctagtaattgggggacagagaacattgctgcctctgggaggtcttgtcctgtgattcctggggttcttctctagtcaggcccatctctggcttctccatcgggggtctaaacccatgggttccttcttgtcccaggacctcctccctaccacggactccacctcaagggtgggatagggttaaccctgggaaggttaataatcagatgctctgggcagataaatagcacggatctccttcatctataggagaggctgagtactgaggagaggagaaagtggtctggtgatggccattcttacctccctttggctgcaagccaaaagcagtctactctacagttcactgcaccaattctccttggaatagatttttgtggccacctgttagtattcgagcataacctttggggtctcttcactcacctcccaaaccccatctcaaacagctaatcaaagcctcctttccaatgacatacagtgcttaccccacagaagttccacaggttgcaattttctccaacttcaaygtcatttccagtgaattttatccaccytgaaatgcttccagctccccagtgatgttccagtggcctttagatctgagacccagctgctctacccyttaatctggctcagytgaaaaccstgggggattctccagcctccgaggccaaggcctgcttcatttaaaagaggctttgttgctggtgggtttgacctggcttatgattttattacgtggtctggggcaggctggatacytcagctggctagacagcgggagtgataatcactttttagcttgacttttaaaccttgctgcgctctctttaaattattttctttttaattttgctatgctgtaagcttcagtttacaaattagaaaatgtcaaggtggctgtaaaccccatttgttagcaggtcccaacagtctttgggaggcatacccagcaaactgaagcctataaggttgttatrgtaggtagctagtcaggcatgagcagggcaggagaggggtccgcctgaccaggaatgtcaggtaaccaccaggtgatggtcaggcggttgttaactgtctctctaaagtaataattggtcacagtcagtgccagggaaaggcagtctccctatagatagaaaaaacctgaaactggtgatcagcagcttcctgataagatctcaggagttgggcaaatgggctcaagcaagtgcattgaggggcaaaacggcggagtttaactggtatatgaccttccagggacattccactggtaagggaagaatgcctcacgtgagcatgcrtacagctccagtaaacacaccgcacctgctcatctcccaagtgctaggaggccactgcacatatggacaacccatgccaagggaagaatcaggggagaagtgacacaagagcccagaagtatgccaatgtataaaaccccaagtcaaaaggtcaaactgcgcacttgtttttcaagtcgcccgcttggccctcttccaagggtgctttccttccttttgttcctactctaaagctttttaataaactttcattcctgctctaaaacttgcctcagtctctccttttgccttatgccccttagttgaattgaattctttcttctgaggaggcagggattgaggttgctgcaggcccatatgaatttgctgctggtaacaaggtcatatgttgaatttctgagagcagctgggtctcagatctaaacaactcaagtgtgttttctcccagtagtaagatatgatgtcatccaggtgtagagaggacccraagactctggagcactgtgtggcctggccatttgtgtagggtaagaagagcaactatgtgcttggagtgcccccaccctcatatccacagcggacatctagtgtggatcatggtgttcttctctcattgaactcaaccttgacttcttttctaagcaattaccaccaattagatttggtgcacaagataaaatctattggctgtcctggacctagagggtattcaaatatggtaacctatgcttttcagcaaatagagtttgcaacaccatcccagctttagcttgccaatatggggacaaactcacacttgtttgtttgtttttaagtgccaaagccattaaacaccaactctkccaggcgagttgctggggcttaggaataaaaaggatgtttaaaggggtattgtcttcaatgagctcacaaaccagagatgtgcatatctcactgtaacacgctttggtgagtaccattattagcacatgaacagagcactgtgtatgtagagaggaggaaaagaggaagagtgtgartctacctcaaagggtgcttggcaggtagagaatgaggaagaccactgaggcccaggaaaaagaatgtgctgaagtcttaaaatgctgaaaggacatggtgtgtaccaagaagagagtgtctgatctggcagaagcatggggacctgggagttggggcaaagagggaggaaatgaggttggagagaaaagctgttgcttcaaagaggactttttctgctttgatttgaacctgtggatccttctycccagcttgactcagatgtcctttcctccatctgcctaagtgattcttctaccttctaaggtggttcccatcttctgctccatgygggatggattccaggctgctcaatatgttgatctctagctccatcatcctgaaawgtctgcagggtgggcaaagccaccatttattattaagactgcttaggagctttgaagtaggagctgctttgaagtaggagtgcctgagtcactgtatactaatgtgatcatctctttgaggaaatgaagatgaagccctgaaaatatctctttatctttttgatctatagtgtttttcccaaccttaatgaagctaacaaagattcattatttaatacaaaggctatcagacctggtgtgactccatcaacaaaggaatgtggctgtaaaccctatttgtcagcaggtctgccccttgtcagaaagaagggagagcaatgcagaaaagatgacatttaagtaaagaaagataataaaacttcacaaagaaagtcccagactagacaggcaagcagatgccaccctgggccactgggagyaggagggccagctgaatccgataccaaggaataacatcccccaaatcaggcatgaagttaaacagagccctggtgagcatacagttgtaatgactcagtattcagaggtggaaggtaaggaaggggcttgatccagtgagcagaagcagatgagaaaaatcatgtgggcaggtatgatgaaaaggaatcagatataggatccttccaaaattgtcttccctagacacagatctggtcaaatacatctgtttaagaatcttcagtggctcttagttgaagatacaattacatctaaatgccttagccaagcactcaaatttctccacagtttcactcttatcaaattttctggtcctataaagctgcctgtgatttcctgaactgacctctaattctctcacctggatacctttctcaagctcttccttctatttgagtaaggtattgaggtgtctctccctctgtcctaaattcccataacacgttcttttcctacaattcttagcagtttcctttgtgcaggtaacaatggctttgttccttcctcttgactacaaacgtacttatttagagattgtaccttttttattattgtactcaaaacaacatctagcccagtactttgcatgctataaatccttaatctgtacttgttggaagtcagcagaatggctttcaagcttacccaagactgaaacagaggcgatgcctgtgggatcttctgggagagttcctttttttaaaaaatcttttattatactttaagttctagggttcatgtgcacaacgtgcaggtttgttacacatgtatacatgtgccatgttggtgtgctgcacccattaactcgtcatttacattaggtatatcctgggagagttcttaaaggggtcatgcggggtgataggggcagccagagcctatgacaaaggcaggcagaggcttcctgttggtccccctccagagtggtcatgaaagtctcttttattttattttattttttgagacggagtctcactctgtcacccaggctggagtgcagtggcgcgatctcggctcactgcaagctccgcctcctgggttcacgccattctcctgactcagcctcctgagtagctgggactacaggcgcccgttaccacgcccggctaattttttgtatttttagtagagacggggtttcaccgtgttagccaggatggtctcgatctcctgacctcgtgatccgcccgcctcggcctcccaaagtgctgggattacaggcgtgagccaacgcgcccagcctgaaagtctcttttaaatttaattttatttattactttccttttataccaccactgaaatgcctgaagttcatggaagcccttaagggcgtatttcattagggtgacacagtcatacatgagtagaaactttatatattctggtccaggaaatatgtccacctcagaaggagcactgtccctgggtctgtctctggacagaataggaattcaaatgaggtacagttaaaggctgaaccccaagggtctatgagtttatagctccacctgctgatgtctgaggctggggcttgggactagacaagggtgcctgaccaaggtatctgcctaggattctgacttggagaagggagagaagaatcaaagaggatcgctgtgccctatgctgagaggggtgagggatgggaagagttggtgcaggacactctagaggaatttttgagacttgagtcatctcacaacttttcaggctccaatgccatagaacagagcttctagagtcttctagatccaactggtctacccatcttagaattaccctgacactcactgtggatctggaatgaacaaaactgcatgaattggaggtcaggagattgagaccatcctggctaacatggtgaaaccccatctctactaaacaaaatacaaaaaattagcccggcgtggtggcaggcgcctgtagtcccagctagtctggaggctgaggcaggagaacggtgtgaacccggaaggcggaggttgcagtgagcctagatcgtgccattgcactccagcctgggcaacagagcaagactccgtctcaaaaaaaaaaaaaaaaaaagggaggagccaagatggccgaataggaacagctctggtctacagctcccagcgtgagcgacacagaagacgggtgatttctgcatttccatctgaggtacagggttcatctcactagggagtgccagacagtgggcgcaggccagtgggtgcgcgcaccgtgcacgagccgaagcagggcaaggcattgcctcacctgggaagcgcaaggggtcagggagttccctttccgagtcaaagaaaggggtgacggacgcacctggaaaatcgggtcactcccacccgaatattgcgcttttcagaccggcttaaaaaacggcgcaccacgagattatatcccgcacctggctcagagggtcctacgcccacggagtctcgctgattgctagcacagcagtctgagatcaaactgcaaggcggcagcgaggctgggggaggggcgcccrccattgcccaggcttgcttaggtaaacaaagcagccagaaagcttgaactgggtggagcccaccacagctcaaggaggcctgcctgcctctgtaggctccacctctgggggcagggcacagacaaacaaaaagacagcagtaacctctgcagacttaaatgtccctgtctgacagctttgaagagagcagtggttctcccagcatgcagctggagatctgagaacgggcagactgcctcctcaagtgggtccctgacccctgacccccaagcagcctaactgggaggcacccccccaacaggggcatactgacacctcacacagcagggtattccaacagacctgcagctgagggtcctgtctgttagaaggaaaaataacaaacagaaaggacatccacaccgaatacccatctgtacatcaccatcatcaaagacgaaaagtagataaaaccacaaagatggggaaaaaacagaacagaaaaactggaaactctaaaacgcagagcgcctctcctcctccaaaggaacgcagttcctcaccagcaacggaacaaagctggatggagaatgattttgccgagctgacagaagaaggcttcagacgatcaaattactctgagctacgggaggacattcaaaccaaaggcaaagaagttgaaaactttgaaaaaaatttagaagaatgtataactagaataaccaatacagagaagtgcttaaaggagctgatggagctgaaaaccaaggctcgagaactatgtgaagaatgcagaagcctcaggagccgatgcgatcgactggaagaaagggtatcagcaatggaagatgaaatgaatgaaatgaagtgagaagggaagtttagagaaaaaagaataaaaagaaatgagcaaagcctccaagaaatatgggactatgtgaaaagaccaaatttacgtccgattggtgtacctgaaagtgatggggagaatggaaccaagttggaaaacactctgcaggatattatccaggagaacttccccaacctagcaaggcaggccaacgttcagattcaggaaatacagagaacgccacaaagatactcctcgagaagagcaactccaagacacataattgtcagattcaccaaagttgaaatgaaggaaaaaatgttaagggcagccagagagaaaggtcgggttaccctcaaagggaagcccatcagactaacagcagatctctcggcagaaaccctacaagccagaagagagtgggggccaatattcaacattcttaaagaaaagaattttcaacccagaatttcatatccagccaaactaagcttcataagtgaaggagaaataaaatcctttacagacaagcaaatgctgagagattttgtcaccaccaggcctgccctaaaagagctcctgaaggaagcgctaaacatggaaaggaacaaccggtaccagccgctgcaaaatcatgccaaaatgtaaagacaatcgagactaggaagaaactgcatcaactaacgagcaaaataaccagctaacatcataatgacaggatcaaattcacacataacaatattaactttaaatgtaaatggactaaattctccaattaaaagacacagactggcaagttggataaagagtcaagacccatcagtgtgctgtattcaggaaacccatctcacgtgcagagacatacataggctcaaaataaaaggatggaggaagatctaccaagcaaatggaaaacaaaaaaaggcaggggttgcaatcctagtctctgataaaacagactttaaaccaacaaagatcaaaagagacaaagaaggccattacataatggtaaagggatcaattcaacaagaggagctaactatcctaaatatatatgcacccaatacaggagcacccagattcataaagcaagtcctgagtgacctacaaagagacttagactcccacacattaataatgggagactttaacacctcactgtcaacattagacagatcaacgagacagaaagtcaacaaggatacccaggaattgaactcagctctgcaccaagcagatctaattgacatctacagaactctccaccccaaatcaacagaatatacatttttttcagcaccacaccacacctattccaaaattgaccacatagttggaagtaaagctctcctcagcaaatgtaaaagaacagaaattataacaaactatctctcagaccacagtgcaatcaaactacaactcaggattaagaatctcactcaaagccgctcaactacatggaaactgaacaacctgctcctgaatgacaactgggtacataacgaaatgaaggcagaaataaagatgttctttgaaaccaacgagaacaaagacacaacataccagaatctctgggacacattcaaagcagtgtgtagagggaaatttagagcactaaatgcccacaagagaaagcaggaaagatccaaaattgacaccctaacatcacaattaaaagaactagaaaagcaagagcaaacacattcaaaagctagcagaaggcaagaaataactaaaatcagagcagaactgaaggaaatagagacacaaaaaacccttcaaagaattaatgaatccaggagctggttttttgaaaggatcaacaaaattgatagaccactagcaagactaataaagaaaaaaagagagaagaatcaaatagacacaataaaaaatgataaaggggatatcaccaccgatcccacagaaatacaaactaccatcagagaatactacaaacacctctacgcaaataaactagaaaatctagaagaaatggatacattcctcgacacatacactctcccaagattaaaccaggaagaagttgaatctctgaatagaccaataacaggagctgaaattgtggcaataatcaatagtttaccaaccaaaaagagtccaggaccagatggattcacagccgaattctaccagaggtacaaggaggaactggtaccattccttctgaaactattccaatcaatagaaaaagagggaatcctccctaactcattttatgaggccagcatcattctgataccaaagccgggcagggacacaaccaaaaaagagaattttagaccaatatccttgatgaacattgatgcaaaaatcctcaataaaatactggcaaaccgaatccagcagcacatcaaaaagcttatccaccatgatcaagtgggcttcatccctgggatgcaaggctggttcaatatatgcaaatcaataaatgtaatccagcatataaacagagccaaagacaaaaaccacatgattatctcaatagatgcagaaaaagcctttgacaaaattcaacaacccttcatgctaaaaactctcaataaattaggtattgatgggacgtatttcaaaataataagagctatctatgacagacccacagccaatatcatactgaatgggcaaaaactggaagcattccctttgaaaactggcacaagacagggatgccctctctcaccgctcctattcaacatagtgttggaagttctggccagggcaatcaggcaggagaaggaaataaagggtattcaattaggaaaagaggaagtcaaattgtccctgtttgcagacaacatgattgtttatctagaaaaccccatcgtctcagcccaaaatctccttaagctgataagcaacttcagcaaactctcaggatacaaaatcaatgtacaaaaatcacaagcattcttatagaccaacaacagacaaacagagagccaaatcatgagtgaactcccattcacaattgcttcaaagagaataaaatacctaggaatccaacttacaagggatgtgaaggacctcttcaaggagaactacaagccactgctcaaggaaataaaagaggatacaaacaaatggaagaacattccatgctcatgggtaggaagaatcaatatcgtgaaaatggccatactgcccaaggtaatttacagattcaatgccgtccccatcaagctaccaatgactttcttcacagaattggaaaaaactactttaaagttcatatggaaccaaaaaagagcccgcatcgccaagtcaatcctaagccaaaagaacaaagctggaggcatcacactacctgccttcaaactatactacaaggctacagtaaccaaaacagcatggtactggtaccaaaacagagatatagatcaatggaacagaacagagccctcagaaataacgccacatacctacaactatctgatctttgacaaacctgagaaaaacaagcaatggggaaaggattccctatttaataaatggtgctgggaaaactggatagccatatgtagaaagctgaaactggatcccttccttacaccttatacaaaaatcaattcaagatggattaaagatttaaacgttagacctaaaaccataaaaaccctagaagaaaacctaggcattaccattcaggacataggcgtgggcaaggacttcatgtccaaaacaccaaaagcaatggcaacaaaagccaaaattgacaaatgggatctaattaaactaaagagcttctgcacagcaaaagaaactaccatcagagtgaataggcaacctacaacatgggagaaaattttcgcaacctactcatctgacaaagggctaatatccagaatctacaatgaactcaaacaaatttacaagaaaaaaacaaacaaccccatcaaaaagtgggcgaaggacatgaacagacacttctcaaaagaagacatttatgcagccaaaaaacacatgaaaaaatgctcatcatcactggccatcagagaaatgcaaatcaaaaccactatgagatatcatctcacaccagttagaatggcaatcattaaaaagtcaggaaacaacaggtgctggagaggatgtggagaaataggaacacttttacactgttggtgggactgtaaactagttcaaccattgtggaagtcagtgtggcgattcctcagtgatctagaactagaaataccatttgacccagccatcccattactgggtatatacccaaaggactataaatcatgctgctataaagacacatgcacacatatgtttattgcggcattattcacaatagcaaagacttggaaccaacccaaatgtccaacaatgatagactggattaagaaaatgtggcacatatacaccatggaatactatgcagccatacaaaatgatgagttcatgtcctttgtagggacatggatgaaattggaaaccatcattctcagtaaactatcgcgagaacaaaaaatcaaacaccgcatattctcactcataggtgggaattgaacaatgagatcacatggacacaggaaggggaatatcacactttggggactgtggtggggtggggggagggggtagggatagcattgggagatatacctaatgctagatgacgagttagtgggtgcagcgcaccagcatggcacatgtatacatatgtaactaacctgcacattgtgcacatgtaccctaaaacttaaagtataataaaaaaaaaaaamaaaaaaaaaaaaaaaaaaactgcatgaattgctcattctggcccagagtgggtggattgaatactctgttagacattaattcctttgggaaaggctgggayaggtttcctttggaaaggattgggaaagaaaagaaaaacagaaaaaattattagggccacagaaaagtagaacagagaagtgctccatgatacctgacacgtgcttaacacattttttaaataaattatatgaatgattgaattcttggaactgagtaaaagaatagaaagtacaataaaataaaaacagaaaaaatgaaaagaaatagtcttacgatgatgaaaacaagtaggagttgattagaggggaaaaagtcaatagccaaatttaagagattagaggaacaaacaactctcagacagacttcctcctgtggttacctgaagctccagactcatgtaccagtcccaagtacacaagaaagagatccttcacaagtccctggattttctcagatttaaccaacgagacactctgtggctgtccctgaactaatcatggtggcccagggtaggctggctgggggatgaatgatatcaattggccaggtctggatcacaagtcctgccctaacaacagcttattagagaaatttggcgtgcttataggctaggctgaggcacttgctccattagtggggctgggggatggaaccccatccgaagcacagagaatgagagtgggacaggtgtgctctcccactctgggcacactcctcactcctcaaagagtggagtgtgtgtgccgagttgccaaaacttwaaaatgtcttctacatcaactttttctattttttttttcttgagtaactcttcattgttcgagagtatactgaagcattacttccttaaggaaacttcccctgacttatctttgactccagattagatgccccagaacataatgtgtgttctcataactctcccttccagaataggggctccttcaaggcaggggctttgtcttttttcctccatatccctggtactgatggcagggcttggtataattaatatttgttggataactgagagagaataaatgcacggacacttgcaggagtgtgtctcagagtaagatgtggcctcttacccccaaaagggacacagctacattgggatggctgcacccaggagtggtggagcttttgctcaagcagaagccagtatttatggagctggagctaggatgggagctccaagccaagcaaatagaccgagaatggggaagggggcttcacctctccaggagaagattgtcaggcacctcccaagtggtgctattgtttcaggcttccagacaccagggactgagtctgccctacgtctaggtccccaggaaggcatctggtcatctcaagtcttagaattctgtttttctcatgtccaccccttttcttctattgcaccacccacttctggtctcataacagtgtctctgcccctcaactttgctctgccttttcctcaactcctttaaaacttgcacaccactgccatagaagggtccttgaacacatgattattatgtcacccattttgtgaaaaacctcagtgagtctcagtgcttccaagataaattttaaattctccaacccggaattaaacttgtcagtctatctccggracttacctgcatccttatctctcactcctcacttcctagacctgtgcaccagcctataacctgcacttcccattccatctgcactgcttcctcctcactgtacatcagttgtcccacttagtgtcctcacttttcccttttgttatccaatcctacttctccttaattcttgcaattgtctgacctcttgtaaccacagcaatcttttcattctccaaacctttttttttttttttttgagacaggatcttgctctgtcatccaggctagagtgcagtggtgcgatcttggctcaccagagccttaacttcccaggctcaagtgatcctcccaccttagcctcccaaagtgggattacaggcatgagccactatgcctggctattttttttaagacggaatcttgatctgtcacccaggctggcatgatcatggctcactgcagccttgatttcccaggcttgagtgatcctcctgcctcagcatatcaggtagctaggactacaggcggcccaccaccatgctcggcttttttgtttgtttgtttgcagaaacagggtctcactatgttgcccaggctggtctcaaactcctaggctcaagagatctgcctgccttggcctcccattgctgggattacaggtgtggaccactatgcctggcctccctgaactattacgttcctagaaatgttgagcctgtatctgttgtatcaatcattcacttgacacttaattatctaagcccattatttgattacaaacttttgtacaccatctagtcacaggctgagaatgcagtaaatgtgcaatgagtgttagttaaatgaaaaagcaaaggggaacatgttgagtggaaaggggcaaatttgtagtgtggctttagagttctttggatttgttttagtttgattgtgaatactgcttgkgccctttggcttgccacttcattgctgaatctcatttccacattagtaaattgaggataatcttccgagccctacagaggttgcagcttatagtgaacaccaaatgagaggtcatacatgcaatactttataaactcctagtggtaagctattaggtcttctcttttcatttcaattaaaaatgtttttcttcttacttttagacttgcaaccttatttctcgaaagagggcccaacaggataggcagtatttacaaaaaggctgtttacagacgcttcacggatggaacctactccatagagatccccaaacctccctggcttggattcctgggccccatcttgagggccgaagtgggtgatgtgattgtcattcatttaaagaactttgcttctcgaccttactctctgcatccacatggcgttttctacaacaaagattcagaaggtaaatatcaatcctttattactggggtcttgtctctatttcataagtaaggtaactgtcagagttaaagagattttaggagcacattgattacatggatatatttatcttctctctgtctgcttctccatccatctccatctatctattctgtctctctcttccctttcttgctttttttttttttttttttttgagaggtagtctcactctgttgcccaggctggaatgcagtggcatgatatcagctcactgcaacctccgtctccctggttcaggatattctcctgcctcagcctctctagtgctgggattacagatgtgcaccatcacgcccagctaattttttgtatttttagtagagaaaatatggtttcaccacgttggccaagctggtctcaacctcctgacctcaaatgatccgcccgcctcagcctctcaaagtgctgggattacaggcgtgagccaccatgcccggctccccttcatgctttttctttcccttatttcctacctctcctctttcttgctcttctttatgttgacacagaactcctcagtacctgctccaccacgcmccaggarcacactagctttcttccttgtcacttagttgtgcctgatttgcacactagataaagggcaacaygctcctatctccrgtagcagccttggctgtgggtacatttttatcaacagaagctgatccccactccttgcttcaggcggctgtttttggtgctgcctttgtgaagcagccctgtcttccttcttgtgtgtatgttaggagtttcattagggcagtttctggattcctccctaattgaaaaatattaaacaactttcttagacttttgagacagaagtatttctccaacatcaaaaatattttttttgaatcctgtatttcattcttgctcatgacctggtggaataggttgaaaggtgctgtacctgctaggtgactgcttctaggaaatgtgccagcacagtgccattaactctgatgcaactcacattatcatcaaggaggagtttctgggcattaacaaatatcccaaggcagcctaacttgtgaggcagctgctccagccatgtctctataagcagcgagaggagagaactctgatggygaacacacaactgggattgccctttgttctgggctcttttcctccacctggagtgcagccaagatttggtagttcttagttgttgaggatgagcacaaaaattgtgccaggtaaactttaaggtgtaactatgaatgcattttctttaatatagtttttttaacttttattttaagttcagggatataagtgcaggttcgttacataggtaaacttgtgtcatggggatttgttgtaaagattatttcatcacccaggaattaagcctagtccccattagttatttttcctgatcctctccctcctccaaccctccaccctctgctaggccccagtgtgtgttgttcccctctatgtttccatgtgttctcataatttagctcccacttataagtgagaatatgcgatatttggttttctcttcctgtgttagtttgctaaggataatggcctccagctttatccatgtccctgcaaaggacatcatctcattcttcttatggctgcatagtattccaaggtgtatatgcatgtcattttctttatccagtttatcactgatgggagttcaggttgactccatgtgtcttatttatgctgcacgtagcaagtaaagatgtaccaagatagttgtgcctgccttttcaaatatggagaaaataggggcatttttaagtgtaatttttgtcttcawtcctccatctgtttctggaaagcataccttaatagagttaatggtgtcctgaaaaatcatttaggccagtgattctaaagctttatagggctacaaattcttttttcaaaaaaattgtggtaaaacatatgaacataaaatttaccattttaaccattttcaagtgttcaattcggtggcattaattacatccacaaggttgtacaatcatcaccattatctatttccacaaccttttcatcatcccaaaccgaaactatatagccattaatcaatacctctccattcctcccttttgctgccccactggtaacttctattctattttctatgtctatgaatgtgccttttgtgtctggcttatttcacttagcataatattttcaatgcttatgtatattktagtatgcatcataatgtaattccttttaaggctgaatactattcaattgcatgtatataccacactttgtttatccgttcatctgttgatgaatgctttggttgtttccacatcttggctattgtgaataatactgctataaacattggtgcaccacagatctttctgagcatctgtgagagccatgagcccttgcaccagaaaaatatgtatgtgcataatttttttttgagatggggtctcgctctgtcactcaggctggagtgcagtagtacagtcatggttcattgcagccttgaactcctgtgctcaagtgatcctcctgcctcaccctcccaagtagctgggaccacaggcatctgccactacacctggctaatttttaaaattttttcatagagataggatcttgctgtgttgtcctggctggcctcaaactcctggcctcaagcagtcctccttccttggcctctcaaagtgcagggataacagtaatgagccactgtgcccagcctgtggacaaaattttgaacccacttttaagaggttctcagagtccctgaaaacattcataggtccttaaattaagaacatttcaaatgttgtttacccaggaaaccttctctctatcctgtctgcaggactgtcccatttcagaagtgtgttggtttatctcataacacttaatactggctggacatggtggctcatgcctataatcccagcactttgggaggccgaggtgggtggatcacctgaggtcgggcatttgagaccagcctggccaacaggcgaaaccccatctctactaaaaatacaaaaaattagccaggagttgtggcacaygcctataaccccagctacttgggaggctgaggcaggatagtcgcttgaacctgggaggtggaggctgcagtgagccgagatcatgccattgcactccagcctgggcaacagagsaagactccatctcaaaagaaacaaaaaaaacaaaacaaaaacaaaaacaaaccacacttaatactggtatagtagacatacaaatggccaacaggtatattaaaaaaatgctcaacatcactaatcattggggaaatgcaaatcagaactacaatgagatctcatcttaccccagctaaaatggctattatcaaaaagacaaaaagtaccccctccaaaacccaaaaaacaaaaacaaccagatactggcaaagacacaaagaaaagagaatacttatacactcttggtggcaatgtaaattagtacagccactacggaaaacagtatggagattcttcaaaaaatgaaaactagaactcccatatgacccagcagtcccactactgggcatttatccaaaggaataaacctttcattgagcacccaccaggtgccagacactgactcccaggtgccagacattgactctgggtcctgagaataaaagatgaatgaatcataggatgtagtaaaaaaaaaaaaaaaaaatcaatgaccataagtataaggagttaatttcagtgctcttaattctgctccattgatctatatacttatccttggaccaatgccacagtgtcttgattactgtgaaattctagtaagttttgaaatggagtcacataaatccttcaactttgttattcttttcaaggctttttggctatttaggttctttccctccatatatatatttgatcagcttattaatttttaccaaaaaacatcagctaggattttgatagcagtcgctttgcrttaatttggttgataaattgtaggaaaattccatgtgcatttaaaaacaaatggccatcttaccaacattgagtctttcaatccatgaacatggaatttaggtctttaatttctctcagtaatgttttagtttttagtatacaagatttgcatttcttttgttaaatttattccaaagtattttattttttctgttgatgttatgaatggaatagttttcttaatytcatttttggattgtttggtgctagtgcatagaaagaattaatttttgtatgttgaagttatattctacttccttgctaaacttgtttgttagtagatgkttagtggatttcttggaattttctacatacggacttaagccattgtgaatgaagagagttttaattcttccttaccagtctgtatacctttacgttttttcttttgacttattacacagctataacctttaggaaaatatgtaatattagtagtgagaccagatattcttacctttttcccaatcttaggaagaaagcattttgtcttcctccgttaggcatgaggctagctgtacatttttttctagatggctttttatcagattgagaaagtttctttcttttttttaattttgaatttttgtgggaacatagtagatgtatatgtttatgggttgcatgagatattttgatacaagcatgcaatgcataataataacatcatagtacatggagtatccatcacctcaagcatttatcctttgtgtttcagacaatccaattatactcttttcgttattctaaaatgcacaattaaattatttttgactattgtcaccctgttgtgctagcaaataataggtcttattaattctttctaactatttttttgtatccattaatcatccccacttcctcccacctttccactacccttcctggcttctggtatccatccttctattctgtatgagttcaattgttttaatttttagttcccacaaacaagtgagaacatgtgaagtttgtctttctgtgcctggcttatttcacttaacataatgacctccggttcmatccacattgttgcaaattctttcttgtggctgaatagtactccattktgtatatgtaccacatctttatccatttggctgcttattgacacagtttgcttccaaaccttggctactgtgaatagtgctgcaataaacatgggagtacagatatctgatttcctttttggrgggtacattaaaatggggtatgtacccataccagtgggatttctggatcacatgatagctctgtttttagttttctgtggaaatttcaaactgctctccctagtggttgtactaatttacattcccaccaacaatgtacaagggttccattttctccacatcctcactagcattttttattgcctgtctgttgaataaaagtcattttaactgggttgggagaatatcayrttgtagttttgatttatatttctctgatgaccaataatgttaagcaccttttcatacacctgtttaccatttgtatgtcttcttttgagaaatagctattcagrtcttttgcccattttttaatctggtaattagattttttcctatagtgttccttatatattctggttattaatcccasataggtagtttgyaaatattttctcccattctatggattgtctcttcactttgttgattgtttcctttgctgtgtagaagtgttttaacttaatgtgatcccatttgtccacttgtgccttggttgcctggcttgtggggtattactcaagaaatctttgcccagactaatgtcctggagagtttgcccagtattttcttgtagcagttttatagtttaaggtcttaaagtttttaatccattttgatttgatttgatttttgtctatggtgagagataggagtctagttttattcttctgcatatgggtatccagttttcccagtaccatttattgaagagactgtcttttccccagtgtgtgttcttggcacctttgtcaaaagttagttcactgtagatgtatggatttatttccaggttctctattctgttccatttgtctgtgtgtctgtttttatgccagtaccatgccatttgggttactatagctctgtagtataatttgaagtcaggtaatgtgattcctccagttttgtcctttttacttaggatggctttggctattctggtttttttgtggttccatataattttaggaatgttttttcaatctctgtgaagactgtcattggtattttgatagggattgctttgggcagtatgaacattttaacaatattgattcttccaatccatgaacatgaaatgtttttccatttttttgtcctcttcaatttctttcatcagtgttttatagttttcattataaagatccttcatttccttagttacgttaacttctaggtatttaattttatttgtagctactgtaaatgggattactttcttgatttctttttcagattattcactgttggcatatcgaaatgctactgattttgtatgttgattttgtatcctgcaactttactaaatttgtaagttataatagtttttggtggagccgttaggtttttccaaatgtaagattatatcatctgcaaataaggataatctgactttttcctttccagtttggatgtccttatttcttcctcttgtctgattgttttagctgggactggaggaaattcctttgtattcctagtttgttgagagtttttcactaagtaagtactggatttttttcaatacttttctgtatccattgagatggtcatgtggcttttctatatctattgagatatattgatatatattgcattaactaatttttggatgttaagccaacctggcaatcatgggataaatcccatttggccatggcatagaatcctttttatatgctgatggatgcaatttgctaatattttgttaagaatttttgtgtctaagtcatgaaggatattggtctgtagttttcttgtgatgtttgtatctgattttgttgtcaaggtaatacttgcctcatagaaggaattggaaagtctccactcttctgttttctgaaagattttgtaaaggattggcatggattttttttttagtatttgwtagaatttttatataaaaccactggacctgaatttactttcagggaggatctttagttactaattcaatttcttgttataggtatattccaattttttatttttatattttagtcagttttggtaacttgtgtcttcctagaaattcgtgtgtttcatctcagttgtctattattttggcagaaagttgcctataatatttccttataatccttttaatttctgtatggtcagtgatgttgcctctttcattcctgactttggcaattagtgttctctttctctcttggccagtctaaatgaagttgtctcaattttgttgatcttttctaagtaccaacttttggtttcatctattttgtattttttttctgttttctctttcactgatttctgttccaatctttatttcttctttctacttgctttgggtttgtttttctcttccttttctagtttcttaagatgaaagcttaggttattgatttgagagttttttttaacttctgagatagatgacttaaaatctaaatttcctttttaagcatggctttacctgtatctcataaattttgatatttttgtcttcattttaattcagttcaaaatattttacaatttcccttgtgatttcttctttgacctgtgggttacttagaagtgtatcattttatttccaaatatttagatgattkcaaagatttctttctgtagatatttaatttaattccattgtgattgaaaaatatgctttgtatgatagtaatccttttcaatgtattgaaacttattttatgcctagtatgtgctccattctggagaatcatccatgtgctctgtaaagagggtatattctacagttattgggtgcaatgttccagagacatcatttaggtataattggttcatagtattgttcaagtctcctatatccttgctgattttctgtttaggtgttctatcagttattgagagttgagtattgaaatcttcaacaattattgttgagttgtctatttgttctttttttggggaaggtctgagtgtcatttattaacaacagtttatacagatctattttcaaagcacaggcacagagccctggagaagagcagtctctgaacaaggaagccaggaacacaggatgtacacatctttggcaggcatgtttagccccagaaggattcaatacttcaagttggaattccattggatatttgagagggaccaaaattgagggtagaaagaagtcttcaacaggactcagatctcagtctagggctcctcttgcactatctaagtccatccrggtattaggaccctggggggcaacaatcaggcctacccatttcaacagaagcagattcttcaatctacactcagttagttcacacttgtttccactggtcacacagttaaagagaatcagccttatagtaagagacagaccactttctctctgaccctctccagcacctctcttcagcttcatctgtgcaggaactgctgggaaaattgaggcctaccttttcaattcagctgcatgtgcttttaccctcaaatcttcaatcaacgataggatggaggctacatgtgtactcaggctgacaactgttcttcccagtccatcacacacattgccctaccttagttctgccaattgcagtacctaggctggagctacagtagacctcaaattgggacctaaagccagtctgcataggcacttgggaatttttcgtaggggagtagataaaaaagtctttgaatatgcgaagaaagaaagagcttcatttgataattagacatctgaagtgattttacttttattttcttcactttaagccaatcatgaaatttcacagtgatttctcaggtaggagcagaaggaagacactgttactcattggggctgtggcccagttggcttgaggaagtacaggcagggtgggtccttactggggcagctrgaggggcacagactgctctgccggaaggtaggtgatgatatgagagcataagaactggtatgtaatrtcatctgcagcttccagcttgtgtagctcaatctggccatcacctgtggtggccagtgaattggcactcagctcagctgccttggagactcccttggcagagatgatggccacctttttctgctgctcagattttccaccatgaatctggccctctctgattcctgttgagccacctgtttcactcccaccacttctgtgaactccttcccaaaggtcagatgtgtcaaggacacatcatccaagatgagctcaaaggtggctacttagtctgcaaggtcgttgctaacctgcctggagaccagctctctctgggkgatcagttctccatcatcaaagtaagccatcagtaacatgaggatcttttcacatcatccaggatgagctcaaaggtggctgcttgctccgtaaggtcgttgttaaccggcttggagaycagctctctctgggtgatcagttctccagtatcaaagtaagcaatcggtaacatgaggatctcttagtgatgtacagcagcacacgctcatcatagtcctttccaatgctgktgaagatgtgaggaagctggctagtgacaggctggaagacaatgcactctgtgatcttgacattctgtaaatcttcactaccagtgatgactggtgtgttatgtgatcaagagtagcagtcaacgataattggtttctgtacccataggatgagaaaatgagttcctttccatactgcaatgtcctgtactccatggaatctgccaaagatttagctctgtgctcagcatccacataatataaggcagagcctaccgtgcctcctgtaacagctaaggccaggccaaacttgccartggactctaacactttggcagccatgtttccttctgctggaccctttcgcagccagcttccattctctgttctttaaattaagtcagtttttccttcctgtattttgatgcatttttgttagatatgaatacatttataatgttatattttcctgatatattgacccttttatcgcgacaaaatatctttgtctctaatagcatttcttgtcttaaaatctattttgtctgttattgatatagcctcttacttttgctatttgaattattttactttcaacttatttgtgtctttcaatgtaagacacaatacaaacagcatataatagaattttgctttttttcccccagtttgacaatctctacattttgattgtggtgttagaccattcacagttaatgtaattatttattagtttgatttatatttgtcattktgctaattattttctatatgtcttctgtattttttgttcctctggtcctcttttactgccttcttttgtgttaaacaaatatttcttagaataatgttttaatttctgtttattttttagcctatatatcattgagttattttcttattggtttgcctcgggattgtaatatgcaccctagtttattacatttaccaactaaattctggtaaaatgtagaagctttgctccataaagctccattctctccccctcctttgtgctattattgatatctatctatctatctatctatctatctatctatctatctatctatctatctataatgcccttctctaaataaacccagcaatacgttgttatatacttggtgctttatattactttatgacttttaaaaaataaaataaaggaaaatatatttatagaaccttttatattaagtcatatatttcccayttctggtgcttttcatttcttcctgtgaattcaagttactctttggtgtcatttccatttattatgaagtttgattgtcctttagtattccttgtaaggcagttctgctagtaacaaactcactcagtctttatttatctagaacatcttgcctttagttttgagggatcgttttgctggatatagcattcttggctaatatttcctccctggcactttaggtatatcatctcattgtcttctgggttcgaatgttcagataagaagtcaaccattaatcatattgatgctcccttgtacgtgataggtcatttttgtctatctgatttcaatattatctttttgtcttcctttcctctttccacagtttagcaatgatgtatctatttgtggacctctttgtatttatcaaattttggctcattaggcttctttgatgtgtaggttaatgtttttcatcaaatttgggaaatttttggccattatttcttcaaatatttatcccacactttctttttgttgttctcccctctttctgcagacaactgttatacacatgttagtaaatacattgtcccactggtctctgaggttctgtccattttcttctatttcccccacctctctttttcagataggataatttctattgatctagctttaagttcactgatactttcttttgctttcttgaatatattgttgagctcctctagtattttatttaatttattgtacttttcaatgccaaaattccaattggattctttttaatatttctatttgcttattaagattctctatttgttgagttgtttttcccacttttcttcagccctttacacataattccttttagttgtttgaacrtatttattatagctgctttgaagtctttctctgctaaattcaacctataaggacatatagagagatagtttccactggctgcctttttttctctattaatcacacttgcctgtttctttgtgtttctcatatttttgttgttcttgaaaactggatatttttaagaatataatgtagcatatctggattctcattccttcatcaactctaggttattttttttgcttgcttctttgtttagtaayctgtgggctaaatctgtggattatctttcctatagtgtgtggccactgagatgtctgctttttttattatttatttttatttttaagcctggcttctgagaggtcattcctatgtctgcttagctcagtggtcagcaaatgatttgaagaagttgtgcctaagcatcttgagccaataaatcttatattctctgctagtggatctgtgagtggttagaaaaccagtgctgtagaatcctactcctcttagctgatgttcagcagtttcaagcataaacattgctatatgtttttattcaatttctagataccaaaatggtttgttattttttttaaatcaattttgtctaactttatagttgcttttttgggaagagaatttgctgacttctttgctctcctttaataaggttttgtctttgctacagctgtaagcttaaaagtcttgaagtctctgcttaattcaacttagtgtttgctgtgagccagacacaatactgggttgcaaagaagagtaaatatacagttgttgcttccaaaatatcatccaggggaggggtagagaatggaacttagaagtgggttgagcgggtggggctaacattaattgagcagctattttatgctaatgcctgagccagacctcttatatacattccttcatttaatgatagaatgaactagtgctttcttgacctacatctgaaatatgcttaagtattaggactatttaaaaataaattttattgttttttaaattttatttttattttatttgttttatttctatagagatggggtctcgctatgttgcctagactagactcaaactcctggcctctagcaatcctcacatcttggcatctcaaagtgctcatattacaagtgtgagtcactgcctcacctggcctggtttttgctttaatataaaaaagtataaagaagaggaaaattgcacacaatctgattctttacatattcactaaattagttcaaaatagaaaattaaagtgccaaatgaacatggttagaagttcttaagagtaaagaggtataagaagaaaagttaaagccctgctcacttgtctttcactccaaaggcaataatcttaaacaatttctatgaatttttcacagacttttttctatacatatattagcatgtatgtatgtgtatatccttgctcatttgtataaaagggattatgctataatgctttctgtttttcactttttactttgtcttggagattttctcatattagtacatatagtgagacttgcatttaacaattgtgcaatatcccaccatatgaacatatcagttcagtgctgataattatttargttgcttccagttcatgtaatttgaaaaatagtttcaagtatgtttgtacaatacattattacaaataaaattgctggttgtatatactttctttgaataggaattggcaagctgtcttctgaaaaactgcaaattttactctctgccatttgtttatgaatgagcttaattctcccatgaccccatcaatcctcaaaattctcaaatctgatgggtaaaaaaattgtgtaagttttaaaagctcacacagcctagaacatatataagcaaataaatagtgttttatactttcatattgttaatgacaccattgatcaaaagccttaataaattcttttgaaaatgactttcagaacaacttaataaattacctatctccaagtcacgtcttcctttatatttatactttatttttgattcccagtgatattcttcaacttgagtggtggcacaaaggctctgttwggggattctstctcctcatttcagtaatagccttcaataactcctaataataataaaaacaaggcccattaagtaaattgtgaacataagaatttctagaacaattgttatttgtagtgatttgtaycatataatcaattcaaaataagtgatctcaatcgaaacttcgagacaagtccactgcttacccactctcaytcaactcctgaacctctgtatataaatctctccatatagaaaagaatcttccaagccatgcattttattcagagggctttggacaaaggcagtgtaaggtaataccactcagtcatattttattttatatatatatatatatatatatatacacgcactggggtagatcttgaagatacgatcatgagcaaaaagaagcctggtatttgctttaatgcagcttacagtctaacatgagaaagagacattagtgaagcaatcatacatacacacayatgcacacatgatatatatatgtgtgtgtatatgtatacacatatacatactatatatgtgtgtaaatatatatatggtgtgtgtgtatatatacacttacatatacacacatataattaaaaacttaggcacatgytataaatgaataagatagtttactgaaaggctactatataycaggcactgtgataagtgctttatagatatcatatcctacaagtctcaacaactcttaagaggtaggcatttatgattatcaccacctaacagataagaagctaagagtcatagaagagaaggaaattgcccaagctgcatacctaacaagtgatggaggtaagattcctttccaggcagtctaatttcagtggctgtgagcttaaccagtggctctactgcccttctctcagtgtgaatgcattttagataactgacccagtccagggagttcaggattgcctgagccagaccatgctggaccttctaatctatattaaacacatttgaccttcatcccaacactgatgggaagcaatgaaatgattttaaacagggaacaatagaattatatttaagatttgaaaagatcactcttgtggtagcttggaaaatggattagaaaggctagaggaagggaagccaactaggaggttactacaaagtccaggtgagagatgatggtagttcagactagggatgtgatgttggagatcaacataaataaatggatgcatttgagaagaagcggagataggaccctgtggtattttggaaatggaaagagaggaaaaggaagaaaaatgcttcctttgtttctggcttgtggctgaayattggtagtgccttttactgggagtagtggcagtggctgaggaccaagcttggtagaggagagctaatgatccctggaaaaggttgcatttgcaatcttcttgagatttacaagtagggatgtcaagcagacagttgaatatcagtgtaaagtgcagaggtaaggtcctggctggagataaacatgggggtcactggtgtgtggctgatgggtggcactgtggggatgagtgctatcagctgaggagaaagcacaaggcatggaaggaagaagccagcrttatactttgaggatttctgacaaaaaaatggcagatacaagagaatgaactggaaaagtggactgaaaaagagtggtcaaagagtatgatgtgatgtcctatgagtcaaggagggagggagctgacaatagtatcaaatgctgctgagataacatagtttttttaaatgtcatttggatttaatggatgaggggcagctctctggattttttcctatgtcctgttcctctatcacgttagataagtatcaagtgagaaagcggcaaatacattaatttaactttgagtacaaatgattctgtcaaaatactattgagtattatattctcacctcgtattgagagaaaatgtaagaaattgttttaaaaagaatgtttttgcatcttttggaaagcattcttgaaaacattgaagacataattcattacattactgaataatttatatataataattttcttgaaaatactctctcagaatctagtactagcaaaaagttcctttctcttaatgaactagtaagtttccctttactggacaatgaaagagtataagctaattatattgacctaatatatattaactctatatctaacaatataacctaaatataatcaggaaattcagagctacagttaatatgaatgggctgtaactaattatgtagcatataggtttatttgtaaagtggctcatattctttttagaataaaagtaattaaaagtatgtaaaggaaagttaagtgaataaataagtagaaaatagtttgtacattatattgccagtaactttgatgggaagtcaggtataaatagattcaaatttgactcaagaacatgctaggagtgttaccttaacttaataaaaaatgaatattaatacttttcatatgggattgctttgaaaagtaactgtgataatgtatacaaagtatccactatagttggcacataataagggcttaactgttgttgctttctcatgacatctttctccaaacatcaaaccacgctttcatggtagaatttgttaaatggtaacattagattttttagttttatctttgctttggtttgtcttggccacactggctcttgctgtgttatttgaatttgtattcctaatgcctagcacaytggtagcatgtgttcaatattgaattcacattcttgaatgactgtgtaaatgaatgaatggcaaatggatgtggaatgtgtgcacttccatctccttctctgtcccttaccatccagctttttttttttttcagtaccagtctagctcctcccgtcctttaaggccccttaaatctcacctctgttgtagagcttctgataactataatgtgcacagactggtctctgtccttttagccaggtggtttttatcctatttttagcagtcggctttccttaattgaaaaatcatgtgccatcttggtttatgaaacagagagtaaggggctgttctgcccctgcccactctgtggtggaccctctaccttgtatagcacaggcatcctctggggtatgccatatattttgacccaaaatgacattcaacacattcactttgctttattctccagttgtcccatgtgtttaatacgtattctagtctgcccaacagaactatatgatccccagaggcaggaagaatgtcttacacttcctycctatctctcatgagacctacacaggtggtgaatctgaaataagtccccaagaagtgtttattcattatttcttcttaggcttctccttcccttcttgagtcgatgtcawctgaggggaattgaaatcttcctggttgatatggtagcctcatcagaaagagtccttattatgaacatttattaagttcctagttctgttcaaaacactctgtatacattgcctcatttagttcttatatccctgtaggatagatatcaacatttcagttttactgatasagaacagagacattgagaatttaagtaacttgcctcaagtcccatagcaaataaattttaattcagttatgtttgattccaaagctctggccctctctactatagcatgtgatctctctgttttaactatgttttacctttttttttaattttattttttggaaggagccctatacccagatggaacatctggaaggaacaaaaatgatgacatggttcctcctgggaaaaactacacctacgtctggccggtgagagaagaatatgcacctactccagccgatgccaactgcctgacctgggtgtaccattcgcacatcgacgccccaaaggacatctgctctgggctaattgggcccctgctggtctgcaaggaaggtaaggagctttgtttccaggtaactagggagttgaaatgtgaataagattcaggtcttattttgcctacctcctttgctccacacagaatgtgcctcttccaaatttctttagaaattctgacatggaagatcaatctgacaccatagcagagggcaataattcagatttttgtctaagaatcatcacagcattctgagactttattgttattttaaaaaatgatatttcataacacaatgtatagaaaagtgagaaatttagtcaaatgaccagkaatgccttctgcttcattatttcacccaaataatcatttgctattttatcccttattagttgacttagcatgtctgtagtttgtcaataaaatggactccctttagagacagccagtcttccaagtatgtgattatgaagatttctgttttatgacttttctcttctatggctctgtcatytccattaaagccttttgctgattttatatggtgggttatccttgtaggtataggtcttcaccaaacttcacacttgcctgacactattggaaggaagcaaagctcatcttgatttagttctttctctctactcttttgaatgtgcctgacaggtatcctgaatagatattcagggacacggaatgatgtggatcgagagtttgttataatgtttactcttgtggatgagaatcaaagctggtacctcaatgaaaatatcaaacatttctgcaccraccctgattcagttgacaagaaagatgctgttttccagaggagtaacaaaatgcatggtgagtacctcccatgttcccaaacgtataccaggccttttatactataaggtactacaagggataaaaaatacacagaaatgttgatctgagtttggcatgatttataactcaggkatgaccatggttrgaaagtgatacaatacatgacacatgtttgaacctgaaacaatctgagsgggacagagcagtggatgcatgctaaattgggcatgcagtgtggacaaagccacagggctttgggaaaatggagggatcratgttatattgtaattggaaaagaatcggtgcctgaggtgagcccagagcatgggtgggcttagactgactggaaggagaaaggagaatgaaatcatcgttctataataatcctgtgttttgcaacattttgcttcatccagtaaccattttctgagccgctgataaattttaagaactgagttatgcatggggtttaaataagcacttgtgaattcattatatttcccaggcattctttacatcaacaaaatttactgagcatgcactatacatcagactccatatttgttcaaaatagtgaacttctatagttacttcattagttgagatggggcacttactcatgcctgttttgcaaagcagtagcttaatgtagcattttaggattttcttagagagttctagtgaacataaaggaaatagtcaacctacatatcccaccttattcattgacatatcttctccttctattgcttctctgtctctcagaattgttctaaccaaggtatcctcaatatagtcataaaatcataagaggaatagaaggagctgaagatcatctaacgtctccattttacagaagagaaactgaggtcaagagactatcaatgacttgcctaaggtcaaagtgataattaatgccagagagtttcctgagagaagtcccatagcaaataaatgtaaatttggctgtgtttgattcctaggcacatcaaggcatgattgtcagtacattgattatttccattgtattgcatgccttcttttttccttctagtggtattttggcaaccttatgtgtagtgattcttggaaaatattttaggaggaaaggaagtaagggagagaaggaaaggggaaggcagggaggcagagaaaacaatgaaggatggagtcaatgaagacatamattcaaatcattgctgtgaccagttrtaatgcatatcctttacaaaatgggagtgatgatctcaaatattgcagaaaactactaattgtgattacttaagactcacctgcccaaataattcctcttactctgtatttattcttttgaagtgaaaatgtccaacaaaatgaaatgaattacataagcaaacatagattacatgtatcataaaaagaagcctgtccaggcacaatggctcatgcctataatcccagcactttgagaagcaggtgtgggaggattgcttgaggccagaagttcaaaaccagcctgggcaacataggkagatccgttatctacaaaaaattcaaacaaacaacaaaaaaaatcagctgggcatagtggcacatgcctgtggtcccacctacttgtgatgctgaggtcagaggattgcattagcccrggagtttgaggctgcagtgaactaagtgccactgcaccccagcctgggtgacagagcaagaccctgtctcaaaaaacaaaaacaaaaaaccctagcctgtatgctgaagtagatgtgtgtttgcaaacaatccttcaagactggaaaagggtgggrtattgtggcacacgcctgtaatcccagcactttgggaggccaaggtgggaggatcacttgaggccaggagttcaagaccagcctggccaacatggcaaaacctgtctctactaaaaatacaaaaattagctggtcatggtggtgggcacctgtaatctcagctactggggaggctgaggcacaagaatcttttgaacccaggagacagaggttgcagtgagctgagattgtgccactgcacttcagcctgggtgtgacagagcgagactccatctcaaaagaaaaaaaagagagagagactggaaaaagagacctaatcaagtaaaggaaaaaatttaattaaaaaaatctagactatggaagataattaatatgtacaagttttattgatcaatttatttaaatttactaaaataatttagaattaattgtgctgcctaagtcatcaggcatttcagcaacaattgcttttaactcagttcgaacttaagaagggatattgtgactttttaaagccctgaatcaagttcttttctgaacttggtcaactcccagctgccatttagatggttttaaagtattcggtcctggatttacgccataaacttaataagattctgctccagcaacatgtagtaaaaactgtttttctcttggctttttaaagtraacaaacaaacaaacaaaacagttctcataaattccttttaatcaattccttttctttccatcttactacatgcttttgtcacttcattaagtagatactatgtgccagtttttctgctaggtcctgataactgttaagatgaacaagacagggtttctagttccaaggagcacagaatctggtgragacagcagatatgccagtgaaggattatgacagaaggtgactgagcctcctgtaaatatgagcagcactctgttttctcctgacctcatattgcgttcccacagcagctccgaggctgttctcagtgtatgctgatcttcacttttattgagtgttttctctggaaaaaggccaataaaaacatttcatttctcttttggacaatatatatttctaagagccaggtttttctgcaccaaaaccttacaaccaatggtctgcactggttttccagccatgcttaagcccgtattaccaacatttctggtcccagtcgcctctgcaggggagtctcttccactagcgtgtttctgtttccagccctcaatggatacctcttcggaaacttcccggagcctgatatgtgtgttggagaatctgtgtcctggcacctatttggaatggggaatgaaatagacatccattctatctatttctatggtaacaccttcatcagcagagggcatcggactgatgtcgtcaacctgttcccagccaccttccttacaacagaaatgatagccgagaatcctgggaagtggatgataacctgccaggtcagcgaccacctacaaggtaaaaaggataaagaccagagttgatatgtttagaatggtacaatcaaaccacacagtcactagtgctcatccagtacctactgttagatagagycttgtatgtactatatttaattaggtaataaatatacaggaaaatataaygctcatctctttgatattctatcaacagatatttattgaccacttctgtatgaaaaaagtggggaagtgattaaaaattgatgagaccttcgaggaacctgtagtatagttgttagacatagttagacattcacaaaatgaatacgatttaaggcagaatgagataaatgctctttgggtgttgcagtcactactctggagcaatcagaggggcttcctgaggagctggctcctaacatgagccttgaaatatgagtaggaactgaatagatgaagaaggaaagaaagacttttgaggaagcagcatgaactgggaaaaacacatgttctttttgagcaactgtaagtagagtaataaggttttagcactggaaaggactttctggataataaggaccaatcccccctcgamttatttaatttcgttttgaacatctcttgtgagtagttatagcagctcatctcatctctggactgctctattggaatgttcttcctcarattgagacaaaatccattgacctatagcttccttcatgtcctatgataggtgcatgataaacatttgttggcttaaatgcctgttgaatgacctggtcctggtttcttcrgacatcatacactatgtcctttcttagctggaccataatgttccttacagagaagtgatgacagaagagcctgggaggctcatcaggccccttagcaaagctaaggaggtggggctgtgtgatccttagctcttttggcacactagtgacataatcggtgcagttatttaagaagataaatgtatgcatgcaagaaggacttgatggaggaattctgmccactggatgctagttaagaagcatttgacagtgttagaggtctaacacctaaacgtctgccctaagatgatgaaaccaagacagaaaaaatatgttaatggaatagacacagaagaaataatgtctgatatttggrtactaacttcccatagtcactaataggtgcaaagatccagctgctcagggctgctttkgtaacacattcttgttcctgtccaccttccacagtgagtcatagcattagtcaactgcagtatcccaattacattcaactgaaaaattaatcagttaatatgtactagatgctcttctgggaaaacaaagattaacaagagaaggtttctattctcaaagagtcttatgctgttaaatctgggaagaaactgtagatttaaaatcaagatattagcwgccatttgagactagtaagatcgctaaattagcccgatagttgtggacataagctrgtatttatacgttccctgaaatacagtatttctaaattgtccatgccttcagaaaaaagttattgtaaaaaaattagaaaatacatataattggaggttttttaacaaatagagacagggtcttgctatgttgcccaggctggtctcaaactcctgggcccaagcaatcctcccaccttagcctttcaaagtgctgggattataggcatgagccactggatctggcccctataaattggttttaaaatcagtagttccataatagaaatattttatattcacattttggtgaatatcttccctattttctatttcttaatatgtaaatatatatgtattttaaaaaatgaaatcagtctattaatgctgcactgtagctaatttttctcatttacaaatatatcagaaacacattttcatgtcggtgaatatagagcttacttcatcatggttaatacttccagtgtccattataaggagattacatcttgcttaatcaatactctattgcttaatgcttatgtttcccaccaatttttttgctattataaacagcactgatgactattatttatagatgtttgcacttttgtctgaacattttcttagaaaaactcctagatttagaatttctgggtcaaagagtatgattttttwaaaaaagctatggacatacattgccacattctcttttggaaattgttattcttctacmcgaagtgtatgagtatggctctttccccattcatctaccaacactgagaattattagtctttctaatctttactaatctgatcaatgaacaatagtatcatttgaaaactgttaaggtttgagtactatttgagtactgttaaggttgaacctctttttcatttgtttattggccaatattatttattttgtgaataaactatttctgttccttgctcattttctattggagatttacttgttttcatctttatctgtaaaagtgatttacgtattaatcttttgtcatatgtgtcacaaatatccctcctgttgccatttatcctttttwaaaaaactttctttatggtccaattttctgtacagaagcctaaatgttcaagagccaaatctatcagtcttttcctrtatgattccttttgtgatcatttatgcctcagctcgtggttttcctctgttctgcagctggtatgctggggcaatacaatgttgataactgcaaaagtgatattttctaccccaagatgaagggtcaacagaggygctactttatagcagctgaaaaaattctttgggattatgctcctcaaggctatarcaaattcagtggtcttcctctaaacgcctctggcaggtaagcacsctttgttggtgtttctaagcctctcgtcagagaagcatgtgttaggctttctcygtgatctaatttgtattccaaccactgctctgatgagcttatactgcatagatggcataatgtagctgcttaaggtgttcttaatactgcaaaagcactgctgagaactggtagaatattttttgttttgtgacttgacggctgaatcaaaacactagatcattcactcattgatcaaacatttcttgagtaggcactatgtgcaaactatagtgcaaagtgccattagaaatactaagctgacaaagaatagagtaaggcctttacacatatggagcagacagtcttgaagagggaatgacargagatggagatgacctggcctaagagggttaccctttttggttcaaggatatcctgatttaagttgtgtcccctttatgtcctacaaatattcttttcctttctattcagtaaaatgccatttttctttcaaagccttactctaatgtcacctctgaagtgaaacctttgactcttgatataaatgaattatgttctctctgcgctcccatagaatatactatttaaaaaattaatctagcaatttattaggtggatctggactcctgtgacttgttagtatataatcatatgcaaagttgtctgtgaagatactaaaaaatgtacagtgtgatatcaagaatccttttttatatttaagggaatgttttaaaaattctctttgtgatcaataaaacatcatttgtttctttaattgtacattttattcattcattcattcattcatactttcactcattattctaccaaacggatgcacttgaaccctgtctaaagaatttgtgtgaaccatatgtgaaagactctgatatcaacattctctattgactagtatttctccataaacagaataatgagaattagcattcaaaattgtcttaggagccttctagaattctgaagtgccttctgaaataggaaagattaaactatattcaatcaatgtttaatgtgatatatgaaagcacaaagtgcaagatgacatgagggatgcaaggatatctaaagcaataaaatgcagaggaagaagctgggytcacaagagtagagaagtaactgcaagttacaaataaaagtgaggtgagttgtcctggtagtgagttatctggatgctcagagagagctaagctggccagggaacacattatagaggaagtgagacttaagcaaaatcttaaggagtgatagaatttatttaactgaatagggaagagaggarttttagatggasgggttgatgcaaagcacctgtggcatgggaggaatgaacagatgagactgcagtaacaatttgcatagaagaatgggcactggcatggagaaatagagaattggggtaaacgggatatcaattgcagaggtcctttaatctttttgaacattatttgattggcaattggaagcaattgaagattttggagcaggtaaatagcaataacaattrccattttggagattaatgtattaagtgaaaaaataagcacagtcttggccattgaaagtaatttgtaatcacggtcttggccattatgaccattatggcttacttttgcaccaatctaatagttgtgtgtctatgctgagaagaaaagtgaatgagccagtatcagatagaggatgcagttcagaggttcatataatgggctccacccagtgtgattagggcatgaactggggtcgtggtagtgggaagaaaggaaaagaaaagatgcacaaggaggatagaaaaggaagagtgccaaaaaattttacaaagtaaggatgaatgagttaagggaatgaagcagaaaaagaaaatctacgtggctgcaagaktgatggcaccattgatggaaataagatagtatagagacagtattagtcagaatttatattatcatattcacgacttggaaattttgcatttcatgcatatggtttatatggtagccctccaataattacactatttgattaactagacactccattccttaataatgccagaaatcaaagagcttactagatgcagagaatattcatattaatatcagcaagagagagagggatgcttattctgcagagaaaccagttagctctttgttactttgtagaacaccattctggaactctactattggtaaataaggagtttacttgtgactggttcagtgctggacctcttgggaagaaagtacaatggctgagagaaatgagcttgagtatcacccagcctctgaagacttttagggctggttaactattcctgggaactctgtcaaggcctgtgctgtcttttctggggacatgggtgggcgagtggactaaaagtgatagaatgaagttctataattaaagtatttggtggatatgttgagaagtgtcctcaatcacattcctatgtcttttcagtgactctgatctctacttcacacaaggggacaacagaataggaggaaaatactggaaggttcggtatactgaatttgttgatgcaacttttactaaaagaaagagactctctgctgaagaagcccatcttggaattcttggtacagtaaaaccatcccccatgcattgaacccagggagatgttttagctgggcatgtacatctgcacagaatgactcttctgctytacttctttctgtctcttttcattctcttctctctcttcttctggatattttttcaggcccagtcatcaaggcagaggtgggtgataccctgttagtgacctttgccaacaaagccgacaaggtctatagcattttaccccatggtgtgatctatgacaaggcatctgatgcagccccaaacctagatggtaagtctcactctgggcttagggaggaaacaggacgggtgagcaaagcacttagaaataaacagtcctggttcaaatcctggtcctttccattacctgycctgagagcttgggcaatcacttaaactttctgaacctgattctctcctgtcaaatgcagataacaatactcacctcacagggctttggaaagggatggagagaatttaggacaaggtctggcccatggtaggttcttaggaaatgttcatttctttctttttttctcagcaatatagtaaatctcaaaagtaagctactttcacagtcacttctttttctctaagatggagagcttttcagttgcaggttgcataggattctgcaggtgaaggctgaagggaaaatttgatttctaatggtttgttgacatcgaaatcttacacatggtctttgctctgtatcaaatcaacaaatatatttataaaaaacagtaatgtgtgcttatcatctgatatggcctctccccatcacagagtacatggcataggttctctaaatgtaagaaaggtagctgttgcccagtggctgtgggaactctaatccattcatgatactgctcttgggaaacttctagttccttggtactcatccctattactgcagcagacaccctggcttcctgggatactcttcacactcgagtgtgatgccaggcccagttgagaacaggttttgtggtgatagtgaggggacagaagagaaaggaatggaagagaattccctctccctggacccatcctcaccctctcttgctgcggtaacaattcctaaaaccatcctctcctctttggtcaaaataccaaaatggctgcgtgcagtgggtcatgcctgtaagcccagcaatttggaaggctgaggcaagaggatctcttgagggaattcaagattacagttataatcatgccactgtactacagcctgggtgacatagcaagaccttgtctcttaaaaaaataamagaaaaaaatgctcagaatgactgtgtgtgtgtgtgcagaaagaacactagaactgacaaaatgtttgttaactcagcaaacatactgggcacctttttgcagagcactggataaaatgcagaatgagcctctggccttgtctagtaggaaagaatcaatgtgttttttggcagtacggtgtaagggttaagtgcacagtctttggaatcagacaaaaactgagtttgaatcccagatttgctatatatcaatgtcataaccttgggcattcactaaactcctctatcttgtagttatttggatgatttccaagttcagtctcctatatttcaaactctttaaagataggtttcttgcttaattcttttgggtatcttctgcaagaccaagtgtaatatattctacatagaaagcattccaatgatattttatgaattttcacttaactgttgaatgggccactatcagtcttttaatatttgctaaggctggcatttgagcaagaaattgtatgggatttatgaagaagataatcctttgatttaaacttttatctcataagccagcagattgtggcagtggcctcttctggtaggatacataagagaaaaccactctcctggtacaaaattcttcatcatcagagggaggcacccagggctggaagacccagtctgaccaatgtaatgttcttgcctgttgttttgaataattgttttgtttatatcctcaggatttgtgaaaccaggggcgcatgttaaaccaggtgaaaccttcacatacaagtggacagtgcctgagagygtaagcccaactgctggtgatcctccctgtctgacctatctttacttctcagcagttgatccaattaaggacaccagctctggcctggtagggcctttgctagtctgtaaaaagggcgtcctcaatgctgatgggacacaggtaggccattgagtgtcaccagttcttctcagggttgtatgtgggagagatccgcaacagagccagagacgagacaggaatagtcagttacaaaaagcaatttgtctttcttcctcttgaagtagatttctacataatggagattttatttgattttctggtgaaaatgtaagatctaaatttatagttacaaatgcccactcaggaacctagaatctctgcttgttgtggttaggatttggcaggcctctttttctgtgtgctgcttttattacagaatctttagagatccacatggaatgctaattggaaktattcttcttggacaaggtttctcaaatcaaaattacttggggaccatttaaacatccattattcagatactacagactaattaaatcagaatctccagatgattccaatgtgcagccaacgttgagaaccactgtgacccacaactgtaaaatgaaagttaatcactatggctgaaggaaaaagaaagcatttagataacttcttgcaagtcccaacttagagatttgaattgttcaactgattagtgtagcgaagcatagcctttcaagctatgtctacatgatattaaacatattaatgaaaagagaaaaacagtcatttaagcatctattttaccaatcagaaatagcaaggacatttatttaaatggtatattttataatttttggcattgtgtggctccacttctggactcaaaggaatttccagatttaaaaaacacaaaatatcttgatcctatttggattttcctttctctacatgaaggaacaatcccggaaatgtctattgcatgtgttataagactgaatgtttatgctgtgcctcaacaagcacacaaggcaaagcggaatgattattcatattttaaagctgaagaaactaaggctcagagacattgagtagaattccaggaaatacacctagtaagtagtgaaagttggcagtaaaacacaggaccttgaacatccaactttgtccttttccaatgcatcctcttgcttcctcgcagctaaatacctaagccaaggagatktagtgccagaaaatgtttgaaaggtagtgctaattttgcccccgctgtgtccgtttaatggtacctttgaggtttgctagaagcacctcatagtctgtgggaattgttgcctaagccaaatactattcatggtcagtccacttacacaaaattcatgaaaaaaaaaaagtaccctgaaacatcctatacctataacttggctgagagagaaaaccatttggccagatggaaaggtatgttcaattcaagagttacttatgaaatacctrctatgtgccaggccctctataagcaaaatggtcagtcttcttctaggcaggtggagagatgaaaatgggaataagtgtttgcgtctctttccagtaaattgtcataaattctcccagtggtgaatggtcaggtacagaatgtcatttactaacacccctagtcctccacactaaccattcagtcaaactccctactcccattctgtttctctctttgaatccacctctctatagatctcacacttttttggaaataatctgacttatgaaaaagtagaaaaaatttacaaagaatcttcatgtacccttcacccagattcatcaacatttgatctcatttgctttattattatctctctttgtttttatgggttatttttctgaactgtttgagagtaggttgtagacataatgtctttcagtgtgtgtttcctaaaaacaaggaccctctctgacataaacaaagtaaaattatctgagtcagaaaattaacgttgacattatcaaatctacatacattttaaaattttgccgattgtctcattgatgttctttatagcaaaagaaaaacatgtttttcctggtcctgggtctgatctaggatcatgcattgcattgagctgtctcctctttcccccatgattaatttctttaaattttttttatttttaatttttgtgggtacatagaacttgtatatatttatggagtacacgagatgttttggtacaggcatgcaatgcataataaccacatcatggagaatggggtattcatcccctcaagcatttatcctttgtgttacaaataatccatttatattcttttagttattttcaaatgtacaattaaggtgactatagtcaccctccccatgattaattttatcacagggcaccaggcatgatttttctaaagtgcaaatgagatcaagtcactttcctgttcaacacttccagtggtttcctgtcacacttaaaacaaaaatcaacactatttagacatgccccagcctcttgttcccacaagtgggcaccacgctccctcatgcccacttatgctccatccacattctgttcctctctcaggccaagcttgtctttggctttgggcctctgtaccaggctccttatgcctggaatgtcatcccctgacctttgcgtggctagttcttcttgtcactcctcagagaagccttctctgatcamcaggctaaggtcactttcttttatatcacctgattttactatcacttaccaccataagacagtttccttgtttatttatttgcttatgtgtatagtatgtttcctcctacaagaagataagtgcaatggagcaaggaccttgcctatcttatcttcctttcccagaacaatgcatggcacattgttgacatkcaacaaatatttctggttggataaatgcaatacagggtaagtactcttatccccaaggttaagaagtttagttagcagaaaatgccatattacacacatcttaaacattgtgtggcctgcaaacaaacactgaaaattccagtgcaacctcatttagaaaactcattttccttatccacatttcaatactcagagttgtgtaatgggttatggtttagacctctcacctttcttccctgctgctgtgggagcctactatgtactaacatatactgttcacaaaatagctgtgtgctgcagacaccagccactactcagatgttccatatatatatatatggagaaagagacacacagagmgatatttattatgaggaattggctcatatgattatggagactgatagatctcagcacctgcaggctgagtcaacaggcagaagacccaggagagccaatggggtggctccagttagaaagctgacaggctcgagaaccaggaagagccaacattttagtttaagcatgaaggcaaaaagaagccaatgtcctagttcaaggacagtcaggtgggagaaattccctcttatttagaggaaggtgagccttttggttctttctattcaggccttcaaccaattggatggggtacactcatgtcgggaagtacaatcagttttattcagtctactgattcaattgttaatctcatccaaaaacatcctttcagaaacayccaggataatgtgtgagcaaaaatctgggcacactgtggcccagttaagttattcataaattcaccatcactcagggttctgtcaccttccttctaatgttttcttgggctaacttcccaccctcattaaacccagttaccctccaaatacctgtcaagcaatgaggttcttcaatgcaactcctttcaattgttcattcttctactatggatgattgcagtctcacctaataataacagcactgagtgcttaatatttgtcagttgttgcgttgagtgctttagctaagtcatctcatttaatcttcacaaaaaacatgatgtggggactcctattaccctcacgttgcaagtgagggaattagggcttagagaggataaatcacttgctccaggcttcacagtgggtgaacagaagaatagcattagaacctaggtttttctgttcacatagmccatgatcttttaaaatatattttgatcctttatgttcttccaatttttaatattttattctgaaaaatttcaagtcttcattgttttcttctgtagctcaagcttttataccactgccttctaaagcatcatgtaattaaggaaataactatatataaggaatagtaggmgcaaggagtactcacctcrttgatgaggagttaggaaagcatcacagaagtgggcagctaagcagaaccatgaggttgcttagtggtttgcaagagaaaagagtggcagactatcaaagctgagggaatacatgcatgaaggacagagggatgcagaacacagcaagtgcagagggtgacaaggagcttggccttgcttcaaagtgccaggaggaaagagtcaagagatgaggctgaacaggtaggcaggaaccggaataccattagatgagactgtattgtccaacataaggagagagatatggtcagatgacattgctgagggtccctccagagcatgcagcaggatgaaggtggcttgggtggggagcatgttagagacaggaaagcattgagggatagaaaggatggtcacctccattcttcacagaattagaaacaacaactttaaaattcatatggaaccaaaaaggagcccatatagccaaggcaatcctaagcaaaaggaacaaagctagaagcatcatactacccgacttcaaactatacaacaaggctacagtaaccaaaacagcattgtactgatacaaagtcagacacatagagcaattgagcaaaatagagaactcagaaataagacagcacatctacaaccatctgatctttgacaarcctgacaaaaacaaacagtggggaaaggattccctatttaataagtgatgctgggagaactggctagccatatgcagaaaattgaaactggacccccttccttacaccttatacaaaaattaactcaagatggattaaagacttatgtgtaaaacccaaaactataaaaaccctagaagaaaatctaggcaataccattcaggccataggcacaggcaaagatttcatgatgaaaatgtcaaaagcaattgcaacaaaagcaaagtgtgacaaatgggttctaattaaactaaagagcttctgcacagcaaaataaaccatcatcagagtgaacagacaacctggagagttggaggacatctttgcaatctatccatctgatgaaggtctaatatccagaatctacaaggaacttaaacaaatttamaagaaraaaaactcattaaaaagtgggcaaaagacgtgaacagacacttctcaaaagaagacatctatgcagccaataaacctatgaaaagaagctcaacttaactgatcattagagaaatgcaaatgaaaaccacaatgagataccatctcacgctattcagaatggcaattattaaaaagtcgagaaatggcagatgctggcaaggctgtggagaaataggaacacttttacactgttggtgggaatgtaaattagttcaaccattgtggaagacagtatggtgattcctcaaagacctagaaccagaaataccatttgacccagcagttccattactgggcatayaccaaaaggaatataaatcattctatcacaaagatacatgcatgtatgtgttcattgcagcactactcacaacagcaaagacatggaatcaactgaaaagcccatgtcttttgacaggctggataaacaaattgtggtacacgtacaccatggaatatcatgcagccataaaaacgaatgagatcatgtcctttgcagggacatggatggcacttgaagccattatcttcggcaaactaaagcaggaacaggaaaccaaacaatgcatgttctcacttataagtgggagctgaacaatgagaacacatggacacagggaggggaacracacacactgcggcttgtggtggtaggggtggagggaggaagagcatcaagataaatagctaatgcatgctgtgcttaatacctaggtgacaggttgataggtgtagcaaaccaccatggcacatgtttacctatgtaacaaatctgcrcagactgcacctgtatcccaaaattttaaattaaattgaaaagaaaacatagtcatctctctggtcagttctaaaggaaagcatactgcagcgatctgtgatgctgtgtgatcagataggctcaaatagactgattaggaatacatgctgtgggaagtcatatccattgtcccctcactatccactcaagttaacataatttagctaagtctcgtcagttatatgaattcattatttcactcaaaaatgtatacttgatgcctgcttttccaggcatttttcttggtgatgcaggtacagagaggaatccaaagtgttcctatcctcatgaaactcacattgcagtaggaaaaagttaaaaaaaataacttcataaataaaatagtttcaggtggagataagtgctrtgaagaataaaatagggtaaagtgagtgagtttctgggcagaagatggagataagtttagaaggatggttagggaagaccactctgaggaaatgacatgcagaaaagtgaattgaggaagggagttcttcaattcatgttccacaacacatggaaagaccctgaggcaggaatgaggttggtgtgttcgtggaagggcaaaaggccagggtgtctggagcaagctaggaggtgagtacagggaaatgaagtcagagagagaagctgggccagggctggcaggtcagggtaaggagaaaaagtccttgaggaccagcctggcaacagaggccaaaagagtagaaagccttctaagcaggggctgatttccttggaggacggatgtaacaagaaagacaaattttctgagtggggaataaattcatcagagcaacattcagtatctttatttaaaaatgacctgcgaactcttgggctgatgttgatctgccctgacttattaatattttgtgtgaactttgaaggaaagcaattctgtgaattcctccaagctgtaccttttatgtattcatttctttcttctctgtagaaaggaatagacaaggagttttacctactgttcacagtctttgatgagaatctgagcagatattttgatgaaaacattcagaagtttatctggcatcccttcagcattgacaaagaagataaagagtttgtgaaatccaaccgaatgcatggtatgacaaatgacattcccgcctgtaaatgaaaggctgacttgcattagaagtgaaaatgattggtgtgtttgaattatattaattttggtttcttggatattgttcttggtcatgagtaagttatttcatgccttcagctttagatggtatggtgaaacctccctatctctcagagatgtgaaatttaatacttctagagcactttatcagccttagatgaaggaacacaaattttaaactagcggccaggcacagtggctaacacctgtaatcccagcactttgggaggctgaggtgggcagatcacgaggtcaggagaccagcctggccaatatggtgaaaccccgtctctactaaaaatacaaaacttagctgggcatggtggtgcgtgcctatattcccagctactcaggaggctgaggcaggagaattgcttgaacccggaggtggaggttgcagtgagccaagttcgtgccactgcacagcctgggcgacagagtgagactccgtctaaaaaaaaaaaaaaaaatttaaactagccaagttcacagtatatcataaatgtagaaaattactgacaaactactctcccttgggttcacaataacattaagtctgaaaaccaaagtgacaataggagataatcattacatagcaaagtgtctataattaagtagtatgaatgatttaattaagtagtatgagtgactggtgaatgttaatttgtgaaacactagctgttcctatcccagatcttcatttgagaggaattacttaattctctctccctgtctctttgtatcaagtgttacaatagcaaaccacctgctaattgcttgtgagtaacacaggatgtcattactcttaggcatattacctaaggtagcagagtaatgagagtccaaactcaatgcctgcaagagtgtgcagtcaataaaagtgcccgaagcaagtaacgtaagacaacaggtgctaacctgcttgttttaggacccagcataaaatctatttattgccttttaaagcattatggaagaataacaaaatagcccttaacctcccttccttgcatggaagtaaaaaatagtccaaggttacaagtgccccatggcaaccaggtcacagaccctatggtcccagatgctcatttccaacagagtcccctcttgtgccaatggaaagcayggagtagtacattttcagtgtcatcttctacaaaaggttttgctgtaactgaatatgaatattgtttccaaacttcttagtagacaatataaaggggaaattaaggtggaaataaggaaatatagcagtttcttggtggagaaactaaattgtaaaagaaatttatcatcaaagaggttggtcttcatttaaaaagataataaacaactgaatgaactacatcaaatccagccccaccctattttggcaatgtgaaactactttcatatttagaaatacaatatatagtccaggcactgtggctcatgcctgtaatcccagcactttgggaggtcaaggtgggaggatcacttgcatccaggagttcaagaccagcctgggcaacttagtgagacccsatctctacagaaaatacaaaattagccaggtatggtggtgtgcacctgtagtcccagctgctactcaggaggctgaggtaggaggtaggaggatctcttsagcccgggaggttgaggctgaagtaagcataatggctccactgcactccagcctgggcaacagggtaagaccctctctctstttaaawaaataaataaataaataaataaataaataaataaatatataaatacaggatatatcattgttaaaacaaagttcaaggcaaataatgcatcttaattcaaatgtcacattaattataaactaagttctagcttcagtcttgcttgcagggagtggaaggaagacagcaacaaagccaaaaagaaagggcctgacatggtgcacaatgctttgtgttgtgtttattatatagtctgtattcaaaatatgtttattgaaagaaagaatggatgagtgactgttgtagaaagagaggctttaaacaagcattccaaggcaagagaagattctctaccagccagccaaggactgaatttattagcaccttgatttatactcagatttcattaacatttgatggacaagatttagatcatttatttgcaaagacattatcaaagatttttttttcataaaatgtggtgtccttctcagaagtgccagaatttcttggaatttctaccaataatcccagatctgagtacaattaccaagcaccactggttttgcagacacagaaatattaggatagtacaaaagtaattgcggtttttgcaattactttcaatggcaaaaactgcaatcacttttgcaccaacctaacaaaaagtaattttatttgacaatgggattataacagaaggtcactcatgtgcatgataatagttccttcctgctataggcttagtagagagcaggaggggggtagaaatatttatttctccaagaaacatcaagcatgagacacaattatgtgcatttaccagtcagacattgcgttatatcatggctttcatccccatggggtgagaatgcggtttctaaattcttgtcaaggcactttttcagatagccactatcaatggattggggttgatgtcaaagataaaaacaatttgccactctggaagcacagagggtcttcatatctaactaatcattatttattaataaagtccctccagtaattgtactggggtaaggaagtacgagttatcataaagcaaatttatttactcaaagactaacctcatataagcttaagtaccccctaaaaaacaatccttctccactaactgcatatgcacatatactgtcaattgatttaaaaatctttcaaataatgctgaatccatgtaatcagtaaaagcatgtctgataacttctagaatcaaatgcaaagcccactggcaaatgagggtcttgtagaattcaatgaattaataactgaggaagagacatttaacaagggagatcataggaaaataaccacaaaagaaaaagattttcatatcgagagccttagagaagagtatggggaaattatttcataaacaatctgatttatcccttagtcattcttagaattagtgtccttgcatatgtgttgttaaagataacatttaaataatttccttatattttcattattcattgttaattttggtctccattttaagtggattcaccatgtggcttttccctggtactgtttattctctgaaaacaaggatcttttgtaaacagtttacatatttgaagctcccctgccccatacacactgataatttttcaccgtctttcttcttccatttagctgttaacggctacatgtatggcaaccagccaggcttaaacatgtgtaaaagggatagagtttcctggcatctgattggattgggcactgacactgacatgcatggaattgtttttcaagggaacaccatccacctacgagggactcaccgagactccctggccctgtttccccacatggccacaacagcattcatgcagccagaccatgcaggtaaacttgctgggtccatctcaggtgaccagatttctaccttcaggctcatcctcttagagttctcccacagaagaaattggtagactttgtgcacttcaagtggtgtagaaatagatatagtcttgattagaatcagagaatcctgacttattagtccaaacacatagtataagggacaaaggggaaatatctaaaatagcatccacaaaacagaagtgggagccttctaaagtctttggtgcataaatcctaggagaatgtttttgattcacagtccataaaaattcagccctgataaagtggatatgttttgctctcattgagcatgaacataatttcagttgcttctctgaagcatctaccaggcatggacatcccagtggatgcttccagattacagatgtagccataactgcagcctggtctctcttctgtaggtactgataacagccttttgattgggggaattctctgttttcattctgttgggcacccttggtttcccaacagggcaagctgcattggatctggaatttatggagacccctgtataatgccagtacctggaacttcttctcttagagattccaagctaatgagataattggggcgttttcataaaagatctagagcaacacgtggtagcacatgctaatcactgcatgaaaagtgaggagaacaagccctatagacattgaacatgtttttccaaaccaattttttcatcagtcttaacaagaaaccaatatgctacctaagatgagtacttgctgtttactaatggatgttctacttctttgctttccactggaactgcagtttagatgtctctgtgtcatcaattaagaacttgaggcttgggcttcaaaatctttgcctaaggactgcctgagactaggagctccatagtcttttctatgtgaacttttcctagtgtccagtctctgtacattagtatagttgatcaattatgaattactcaaatcaagagatgccttggacacaacttttttttttaatacgctcttcaagaccaaagagaggaggggattgggaaatagccaaatcattttaattcatagaaataggcactcaaagttagagctgcccagaataattttagaaatggagctacttattctagtgctttgatcattactccatgtgtcctatacatttctaaagagcttcacaacagtgttttccagtttatgtttggtgataagcataaatctgtgactgcttaaaagcttagtcatttcaccaattcctgtcccttacctataagtcaagaaggagggtgctcaagagtgggtagagtagactatatgctgcaactcaaacatttccatgttcttctattattattatcattattattagttttgttttcttcttcatgctaccttgtctaagatcctctttgttcttagaggagacaattcctcaactattgaagtgccatgatcaatacataaaaaataggctkcctggaaaaaacaaatgtaggggacagtctttccaagtctgtcttcaaaggtatcttctctgtggtttcatataaagacccttcctcatgtgtcctcatcagtgcctgggtgtgcttggtacccattgaatcaacccattgaatttttgctcatctaaaaggagtaactaggcgatgtttagacaacagagttacatgtatagcaagatagaggatacctctgtacattgtagaaggttaatgaaaggtacactcatccctcacctctaaaaacagaggctactagagaaaggggagaaagatttattgatccaatattttcattgagagttaatatcttcaataattttatctgtcttatgtgattttatggtgagttragaaatatctatctgatgccaatgcatctagaaaattcaatctaaaaattacataatttttgacagacaggattgtcagtattatgtagaaaaatctaattgattgtttttctgttttctgtttccttttcatttagcataatgtagacctatcattggaaatgagaaacttctttgctcaagggcttaatgaagtaatacatttggctttaataataataacacttacatatttattgcactttagaatttatgaaatcctttagggcaaaatactcatcagaaatatggcttaatttgaaccttgtctaggataatcatcttacaggtaattagttctttttaaactgggctggactaagacagtcattggtgattttccaggacagactgtctyctaataggtgtgaattatatgggagacccagaaaagtcatttcttggtagcaatattgtaagtttctttttttataacaaatgaattttggacagtatctttctctccacagaagtaaatatattcaaagtaatctataccccctggggtctgattttaaactactagacaactggtattttaaaaatccacctaactggttattttgtaataaaatatgcaggtttgctaaaaacagaccatcaccaacaaaaataccgagcaccacactcaatgccgagccatttctcttgcaggtatttttagggtgttttgtgccaccatgccccacctctcgagaggcatgggtcagatctatgaggtcagcagctgtgacaacagggacccttctgagcagcggtacgggatgataagaactttttacatcgccgctgaagaagtagaatgggattatgcccctaacaaaaactgggagttcgaaaagcagcacgtggacgcaagaggggaaaggtaccacaggcgccgccgctagggctcctcggtgggatcgcgcatgctccgtaggtctttagtaagtgtggctccctgcaaattcccaggttgtgtctccacagttccggccgacagagacttttacttatgtgcacagattagggaagctgcccacctcggcctccggaaggcagcgtgcggtgtctcgcaggccctcggcgggctctgctgggtggtcatgggatgcagggcgtgcctgggagtgcgtgtgcagggtgaaaaggctgagggaaagaggcagatcacatggttatagtggggctgggaagacaaaaagggccagagaaggcagagagggtgtatgatgtggggtgagaggatgggctgctgtggatgcaggacctcaggaaaggttgaggctgagccactggcagagcgctgctctaagtgggggaccaccaaggagggacaggaggccattgccttgtaagagactccgggatcggggtaggaagaacaggtttctctactaggccctgtgcccagaaagtctgcaagactggccctcccttaacagtgctgttggccagtgatgcatgcccaagactcagcagctctcaggccgccagcagccttgtaagcattgctcctccagggcgctaagcccagagtccaggaaccaagatccctagggtgcactgggatggagttaaacaagggagaaggcaggcgcagaccacagacctcctcccccagggctaatcccctccctccacagcaacccactgcctggtattactgttctgatatgcagatgaggaaacttggacgcaaagagttaaggcgcccaactagacattggcagagttagaactgaacatagatcttttgaaagacaaataaatccacgttctctccggcacactacattgtccctcctggcccagttcctctttgttctttattgccacctaccctcgccccctgccaccatactcccctcccctcacctcatagacatcctccgtggctgcgagacaaacacgacatgctactgttcctatcttaacacaagtatttcttttcttatttattggcctttgttttgaggggctgtasttatggaaaagagattataatggttctaccttctggatacttttttttttaagatttcccttaagaacaggagaattttaaatccattcaattactcactaacctatttgttaggccaaacacctgtattctgcaaaactagtgctgccaatacaagctgaagactggtgctggtacagtggaaaatgaaatgaattccaatctggccctttctaaaatgattatttcattaaaaggctaccataactaaagaaataattgtataataactttgtcatgtgtacaatcttagcccatgaatgtataaaaatatagcctttatgatgttcwtacaactaatatgaactcctactttaagtctccatcccacggggctagcaggaaggtctagcttcagtcttctgagactccctcccaagtgacataaggagataaaatgtgctggtggggaagggggtgcaatgccataattacaccttcccctgtcactctgattcttgcccatacatagatgaaagcaaagtgagataaggacaagttcacatgttcaaagtttaacaaatgctgtagataacaattcagtatggaattgaaatggcagttctcttagggcacatctgaggcatgtctgtagataagagcccagtgacacataccccttctgcaccctagtttctatgtgtctgccctttgtcccatggccatggtaggagcccatctggtttttgaaccatttgtgggtacaggctatccctgagacatttattatcctggtcagcacaggccctctgccccacyttgggacctagaagtctttctttggggcttcctaaaacatgctgggaaggtctcagcatcccagaaagccaacaaatgggaccatcggtacaatgtccaggggaagtttatgcagtgggaggaaatttgaaaacagaaattaagttgctatgaaaaaataaagttgtattcctagtactcctgagcttgtagactgataggtgtgtgatttagtcatcctgagattctccacaataaaccactgcctattgagcagctactgtggaccaggcattctgctagggattttacaaaccttatctgacataacccttacaacacacctgacctactccaccagtttttgctcagcatctcttgcaccattctcacaagatgatgaaaaagcaagtgcttatatagtgctgaacatgggcctgacatgtgctttacagatactgactcacatgaccctcatatcaattccatgaggtagaggaattattatcagcctggtttgcagtggagaaagctgggaaacggtggaatgtggctacaggttctgcactggtcactaccacatgtaactgggtctcctgaaaaatgaaagtagaagaaaagttctcttcccttggaaatcatacagtctagggtggaagtatacatgcatttattaaatacctactatatgctagacattgtgcaatgtgctggtgaaacagtatggaggatagacaaggtcctttcccacacagaattcctggtccatggtaagactttagaacaagtatgttctatgagaggggaagggtagagtgcaacaggagatatggcagaagcacacagccctgtcttgaggaaaggtagggagaaggttggtagtcggcgggggcttctgggaggaagtagtctttgagttgggacatgaagagtagtccacttgaagaggaaggaagcatgttcgtggcagagggaacaacctgtgtaaaggcctggaggtgagggagagcacatcatgttcaagagagtgaatgtttagaatgaccagaacatagagcctaggggctagtgatgggaaatgaggctcaggaggtggcaaaagcagacagtgaggcttgagagccaaattgaggagtttggcagtgggaaatcataaaaaggcttaacatcaacgttgttaaatgtatagcttaggatccctctgcctgcagtgtgtgaatagagggcaaagaggagtacaggtggcagggaaaatgattaggaacaattccacccaacctaggtaagtattacaagtggctgagataagaatgaaagctccctcaatggaaggggtgggtctcactgtattttagagataaaattaaaagattttaaaaatctgtcttttgtgatgatctgccttggtaatagatgaaatgtactatacatgtaaggtacgtatacagtctatcctcgttatttgtagattctgcttttgcaaatttgcctacttgctaaaatttatttttaaccccaaaatcaattcctgtgacatttttgtggtcatttgcaggtacatgtagagtggcaaaaaatttacgttgcytgatgcacacattttcagctgaggtcaaacaaggagtctctctgccttcttgtttcagctctcatactgtaaacaaatgtccttgttttcagattatttagtgccatcgtttttgcacttgtgtgctttatgttggtgctttcactgtttaaaatgcccccttaaacagagttttgaagcagtgtcctcagtgtaagaagcctctgatgtgccttatacatgtgagaggggctttgttcctgcatgagttacagtgctgttggctgttgagctcagtgttaatgagctcaacagtgttaatgctgttgagctcagcaatatatattaaataaagtgtgtttaaaaagaaacagacataaaacaaggttatatattgatctgttgatgaaaatattgtgaccagaggtttgcaggaacctaaccctatattttccctaggaacaatggttcagtctttattagtccagttatcacaatgactttctagaacataactagggtgaataacaagtatcaactgtatctatctatatttgtatatggatgtatacacaatacatgactatggtccttcttgagatccttcaaagtggaaaagcattaccatgtacagaaagatgcatatgaaatctggagaaactcagggtggtagagggtggacgtgtatgtgtgtgtgtgtgtgtgtgtgtgtgtgtgatgacacacacatgaagatgcaagtgtgtaaggttagatggtcccagaagagaggcgcaacctcaaaggatacttaggagtctctgaggttggccctactcagtgcttagcagaagattacaaccgtgatttccaagggtgggccatggactggtgctgggctgcccatatcagaactgaaggagctttaaagtgcagatgcctggcctcactcccrgaaagtatggtgcaaaaggcctgctccccagggagcacttgatcacagccaggtttggggagcacttctccagaatacccctgaatcacttagaagcgctcaaagcttttctgctttctgacaactttaatttctgatgcttctgatttgcagacatggagatatatttatgaaccgcactgaaaattggattggctctcagtacaagaaggtggtttacagggaatatacggatggagaatttgtggagatcaaagcccgaccaccacgagaggagcacttagaactcctgggtatggcacagatttcaggcgtgcactgtcagccccaagcatgtgcatgcacacatactcatgtgttctgttacacttgtggctaagaaaggatagaagaaacagagtagcttgactgcattcctccaagtgtaatatcttcctgctctaccattatcagggagtgtgctgagtgctcaactcatacaaaaactagtcataataggactaccagataatacacaaataggaatccatgacatcagggcagtctaactggtgtatgataccctaaagcttctttccaacccctatactgagccaggaaattttcttttaaatcctccagcagatagatagatatatatatatatatatatatatatatatatatatatatataaaactttaagttctagggtacatgtgcaccacctgcaggwttgttacatatgtatacatgtgccatgttggtgtgctgcacccattaactcatcatttacattaggtatatctcctaatgctatccctcacccctgcccctaccccacgacaggccctggtgtgtgatgttccccttcctgtgtccaaatgttctcattgttcaatttccatctatgagtgagaacatgtggtgtttggttttttgtccttgcgatagtttgctgagaatgatggtttccagcttcatctatgtccctacaaaggacatgaactcatcattttttatggctgcatagtattccatggtgtatatgtgccacattttcttaatccagtctatcattgttggacatttgggttggttccaagtctttgctattgtgaatagtgccacaataaacatacatgtgcatgtgtctttatagcagcatgatttataaccctttgggtatatatccagtaatgggatagctgggtcaaatggtatttctagttctagatccttgaggaattgccacactgtcttccacaatggtttaactagtttacagtcccaccaacagtgtaaaagtgttcctatttctccacatcctctccagcacctgttgtttcctgactttttaatgatcgccattgtaactggtatgagatggtatctcactgtggttttgatttgcatttctctgatggccagtgatgatgagcattttttcaygtgtctgttggctgcataaatgtcttcttttgagaagcatctgttcatatccttcacccacttgttgatagggttgtttttttcttgtaaatttgtttgagttctttgtagattctggatattagccctttgccagatgattagattgcaaaaatattctaccattctgtagattacctgttcactctgatggtagtttcttttgctgtgcaggagctctttagtttaattagatacgatttgtcaattttggcttttgttgccattgcttttggtgttttagacatgaagtccttgcccatacctatgtcctgagtagtattgcctaggttttcttctagggtttttatggttttaggtctaacatttaagtctttaatcaatcttgaattaatttttgtataaggtgtaaggaagggatccagtttcagctttctacatatggctagccagttttcccagcaccatttattaaatagggaatctttcctcatttcttgtttttgtcaggtttgtcaaagatcagatggttgtagatgtgtggtattatttctgagggctctgttctgttccattggtctatatctttgttttggtaccagtaccatgctgttttggctactacagccttgtagtacagtttgaagtcaggtagcatgatgcctccagcttagttcttttggcttaggattgacttggcaatgtgggctcttttttggttccatatgaactttaaagtagttttttccaattctgtgaagaaagtcattggtagcttgatggggatggcattgaatctataaattaccttgggcaatggcagtatggccattgggaaatggcagtatggccattttcatgatattgattcttcctatccatgagcatggaatattcttctgtttgtttgtgtcctcttttattttgttgagcagtggtttgtagttctccttgaagaggtccttcacatcccttgtaagttggattcctaggtattttattgtctttgaagcaattgtgaatgggagttcatgatttagctctctgtttgtctgttattggtgtataagaatgcttgtgatttttgcacattgattttgtatcctgagactttgctgaagttgcttatcagcttaaggagattttgggctgagacaatggggttttctaaatatacaaccatgtcatctgcaaacagggacaatttgacttcctctattcctaattgaataccctttatttctttctcctgcctaattgacctggccagaacttccaacactatgttgaacagaagtggtgagagagggcatccctgtcttgtgccagttttcaaagggaatgcttccagtttttgcccattcagtatgatattggctgtcggtttgtcatagatagctcttattattttgagatacatcccatgaatacctaatttattgagagtttttagcatgaagcgctgttgaattttttctaaggtctgttctgcagctattgagataatcacgtggtttttgtctttggttctgtttatgtgatggattacgtttattgatttgcattatgttgaaccagtcttgcatcccagggatgaagcccacttgatcatggtggataaactttttgatgtgctgctggattcgtttgccagtattttattgaggatttttgcatcaatgttcattagggatattggtctaaaagtctcttttttggttgtgtctgccaggctttggtatcaggatgatgctggcctcataaaatgagttagggaggattccctctttttctattgattggaatagtttcagaaggaatggtaccagctcctccttgtacctctggtagaattcggctgtaaatatgtctggtcctggactttttttgtttggtaggctattaattattgcctcaatttcagaacacgttattggtctattcagtaattcaacttcttcctggtttagtcttgggagggtgtatgtgtcgaggaatttatccatttcttctagattttctagtttatttgcatagaggtgtttatagtattctctgatggtagtttgtatttctgtgggatcagtgatgatatcccctttatcattttttattgcgcctatttgattcttctctctyttcttctttgatagtcttgctggcagtctgtcaattttgttgatcttttcaaaaaaccagctcctggattcattgattttttgaagggttttttgtgtctctctctccttcagttctgctctgatcttagttatttcttgccttctgctagcttttgaatgtgtttgctcttgcttatcttgttattttaattgtgctgttagtgtgtcaattttagatctttcctgctttctcttgtgggcatttagtgctataaatttccctctacacactgctttaaatgtgtcccagagattctggtatgttgtgtctttgttctcattggtttcaaagaacatcgatttctgccttcattttgttatgtacccagtagtcattcaggagcaggttgttcagtttccatgcagttgagtgattttgagtgagttccttaatcctgagttctagtttgattgcactgtggtctgagagacagtttgttataatttctgttcttttacatttgctcagtagtgctttacttccaactatgtggtcagttttggaataagtgcgatgtggtgctgagaagaatgtttattctgctgatttggggtagagagttctgtaggtgtctatcagctctgcttggtgcagagctgagttcaattcctggatatccttgttaactttctgtctcattgatctgtctaatgttgacagtggggtgttaaagtctcccattattattgtgtgggagtctaaatctctttgtaggtctctaaggacttgctttatgaatctgggtgctcctgtattgggtgtatatatatttaggttagttagctcttcgtgttgaattgatccctttaccagtatgtaatggccttctttgtctcttctgacctttgttggtttaaagtctgttttatcagagactaggattgcaacccctgcctttttgttttccatttgcttagtagatcttccttcatccctttattctgagcctgtgtgtgtctctgcacgtgagatgggcctcctgaatacagcacactgatgggtcttgactctttatccaatttgccagtctttgtcttttaattggaacatttcacccatttacatttaaggttaatattgttatgtgtgaatttgatcctgtcattatgatgttagctggttatttcactcattagttgatgcagtttcttcctagcatcgatgatctttacaatttggcatgtttttgcagtggctggtactgattgttcctttccatgtttagtgcttccttcaggagctcttgtaatgcaggcctggtggtgacaaaatctctcagcatttgcttgtctgtaaaggattttatttctccacttatgaagcttagtttggctggatatgaaattctgagttgaaaattcttttctttaagtatgttgaatattggcccccactctcttctggcttgtagagtttctgctgagagatccgctgttagtctgatgggcttccctttgtgggtaacccgacctttctctctggctgcccataacattttttccttcatttcagctttggtgaatctgacaattatgtgtcttgtagttgctcttctcgaggagtatctttgtggcattctctgtatttcctgaatctgaatgttggcctgccttgctaggttggggaagttctcctggataatatcctgcagagtgttttccaacttgattccattctcctcgtcactttcaggtacaccagtcagacgcagatttggtcttttcacatagtcctatatttcttggaggctttgttcgtttctttttactcttttttctctaaacttctcttctcacttcatttcattcatttgatcttcaatcactgataccctttcttccagttgatcgaatcggctactgaagcttgtgcattcattatgtagttctcgtgccatggttttcagctctatcaggtcatttaaggacttctctacactggttattctagttagccattcatctaatcttttttcaaggtttttagcttctttgcgatgggttcgaacatcctcctttagcttggagaagtctgatcgtctgaagccttcttctctcaactcgtcaaagtcattctccatccagctttgttctgttgctggctaggagctgcgttcctttggtgggggagaggcactctgatttttagaattttcagcttttctgctctgttttttccccatctttgtggttttatctacctttggtctttgatgatggtgatgtacagatggggttttggtgtggatttgctctctgtttgttagttttccttctaacagtcagggccctcagctgcaggtctgttggagtttgctggaggtccactctggaccctgtttgcctggatatcagcagcggaggctgcagaacagcgaatatttctgaacagcaaatgttgctgcctgatccttcttctggaagcttcatctcagaggggtgcctggccgtgtgaggtgtcagtctgcccctactggagggtgactcccagttaggctacttgggtgtcagggacccacttgaggaggcagtctgaccattctcagatctcaaactctgtgctgggagaaccactactctcttcaaagctgtcagacagggacatttacgtctgcagaggtttctgctgccttttgttcggctatgccttgcccccaggggtggagtctacagaggcaggcaggcctcctcgagctgcggtgggctccacccagttcgagcttcccagccgctttgtttacctactcaagccttagcaatggtgggcgcccctcccccagcctcactgccaccttgcagtttgatctcagactgctgtgctagcaatgagtgaggctccttgggtgtgggtccatctgagccaggcaccggctataatctcctggtgtgccgtttgctaagaccattggaaaagcgcagtattagggtaggagtgacccrattttccaggtgccatctgtcacagcttcccttggtcggaaagggaattccctgaccccttgtgcttcccaggtaaggcgatgcctctccctgcttcggctcacgctcggtgggctgcacccactgtcctgcccccactgtctgacargccgcagtgagatgaacccggtacctcagttggaaatgcagaaatcacctgtcttctgcgtcgctcacactgggagctgtagactggagctgttcctattcatccatcttggaactaccccctaagaatattttaagaaattgagagaaaattgaaaataataaccgtccaacaaattttagatttatatatacctttctcagaaaagcaattaaaaccatggcttgaatcagcaaggaatygatatgtgtggccagaccaccaactgtcagtgtatctccctgtgaatgtagaatgcaccagatacccaagagagagccatagggatcaggcacttctgaaatgggagtctactgaccatgaagcagtgcacaagtcatgctgccacaggccctctgagccaggtgtgggctcatctccattggcacccagcctggttgcttccaacagaaatgcacacaccagaggggctgaagagtgcttgtctccttgggtaaacaaatattgagaaacagagttagatgtgyatttgtgaagtcactatattaatcataaattaatacataaatgattttatttccctctactctttcagattccttttacacacattatttcattggatcttcattattattgtcatccatttaccagataatgaataatttcagacttatcaaaggttatacacagggggattacaactgaaagtcaccatatcatgtggatatggcttttcctggagatgatttctcagtagtaaaaaagcatttaccaagtacttatggtgtatcagtgcactgamgtaaacacttttagatacattatcttattcaacccttactataatcccacataaaagttattactaaactgatgttacagatgaggaaactgaaactcagacagattacatcacttacccaaggcccctctaataaatgaaggaagcagaatttwaacccattgctaaagactacatgatatttaatactacacaatgttgctctctaaagtgragtagagttatatatgcctttctcggaaaaacaactaaagccaaactattttatttgactaactactgcctatatttaaattacactaatgttgaaagagcaataataatgcacacaggcctgtgttttgcctttaggcccaatgattcatgctgaggtgggcaacaccgtcctgatcatatttaagaacaaagcyagtaggccctactccatctcagcccagggtgtggaggagatggatagtggaaagcaattccaagtgcccatgacaaaaccaggtaagttgtgtcagaggtctgctccatcttgaagaagaacattggygtcaactcttttctggtctcagaggtgtcttaaagagctcatcttaatgtcaatgtgtttcagccatcatctagtcactctggtatgagatcatcattcatccaatgaccaaatgtttaggaatttctagggttccattagaaacctccattagggaccccattgtcaacatcccccaccagagtagtacatttgttgtaattgatgaacctacattgatacatcattatcccctaaagcccataatttacattagggttcagtattggtgtgtatactctaagggttttgacaaatgcacaacaacatgtatccaccattttagtcctataaagaatagtttcactgccctaaaaattctccgtgctctggtgtttattttttcctcttccttaacccctggcaaccactgatctttttactgtctccatagctgttcttacagtagctcccccttatcacggttttgctttccttagttttagttacctgaatcaatcttggtctgaaaatattaagaaattttgagataacttcaattagagacaataaaaagatattttgagagtgagagtctacattcacatagcttttattatagtgtactgttataattgtcatattttattattagtaattattgtcaatctcttactgtgcctaatttataaattaattataggtatgtctgtataggaaaacacatagtatatataggtatggcactgtctgtggtttcaagcatcccctgggggtcttggaatgtatctctcctggacaaagggggactactgtagtaaacataaaaattaacacattaactgccttcaaaatgaagcattatcctstgtatttaatgacattatttcatttaatcctcacaacaattagaaaactatgatgaccaacccactttacagataaggatactaaaggttagtgacattaggtagctggtcaaatgtgggataaataggaagtcatagggttgagatttggaactaggtctctctgattctggttctcaccagatctcacctgcccacttgagaagcttttaaaaaacactggcaccagagtcctagaccctagactctctgatttcactgtctggggtgaggcctgagcagcaagggcttacaaagctccctggtgactcccataagaggccaaagcagaggtccttgatgacaaagatgtgctcaaggacagctcttgggaaggagataaaacatttaaggaggaaaaacagtgaggtataaaatgtttttatttcctgaatacacaccagttgacaatagaaaaatgcaaactagagggaaggctggagcctgaaatgacaaatctgccatttcattttgaaatagtagaaatyaagatgggagtttaataagaacatttgtaatgaatgagtaattctctccagcaataaacattaatgaaaatatayaaagacctgcttatatttcttcagataaatcatctgaaacacagataattctaataaattttttccatttcatttattacaggagaagtaaaaacttatagatggaatatccctaaaagatccggtccagggccttctgatcccaattgtattccatgggtttactattcaacagtaaactttgtgaaggtaaggtggagaaagcaaccaaaaggcttaaaataatttggatgaaagttgactacttgggtcatcacaatttgggttggtatatgtgaaagcgtataatgatttagagcaagggtctcatactatggcccatttacgaaatctagacatgctggacgtttacattgtcaatggttgacttgagtagctgcaacagagactatatggcccacaaagtcaaaaatatttactatctggtgattttttttttcccaaaaaaaaaaaaaaaaaaaaaaagtttggtgacccttgacttaaagtatggggaataaaaacaaaatcccaatgtttcaattaccaaatttagaacttaaaaagataaarggtttgaagcaaaagaggatatgtaaatatacaacawtaaaataaatataacttaragtacaatttatgtatggttttggatgtgtgaaatctgtttattttaaatgcattattatcagggctactagggctcaggagaagaaagttcactctaaacatagtaactgaaactacaaaattgtttgaatgattaatgatctaactttgaaataaaaggcaaagattcaacattgaatttgagccaggtatgtgtatgtaaaacaaccacagtctttaattacatgccataaaccaaagtccaatctaaagtcgttatttgatgtaaaatgtaagcattgcctattaaagaaaaaaagggagggattatcataaccttcctcttaggtattagatggcttgtattaatgtctttgagttatactggacagttctagagttcaggagatagaaatacaaggcacttgaataaataaacttacatatgagaattatgggaaaatccaaatttatttatgcatcacaacaaatacttattgagcacttgtgatgtgcaaatgaccccaccaaatactatgagagatgcagatactcttgtcttaaagaaacttataactttgtgggaaaataatatgtccacacttgtaactgtaatagagctctgaatctggtgaattctataggagtggcaggctaactaaagtactatagaaggttttggagggagagtctaggaagaaagagcattatgagcacagctgaaaatagggaagtagagggagtgtttgggacatgttgagagtcccatttggctatcatatggggtccagtagtaaatcaaggggtagcctaagtcagaaaatttcattaggggagcacatggagggctcacagacctgcaagggtttgtatttaattytgtaggccacggaaaatcactgaagacttctagatacgggagtataaagattactgtgatggtggtcaacaggatgggctggaggtggggtgaatcagagctgagagaagaatcaatttctagtccagggtgaggtattatgaccctacactagaatggtggcaggtggaatgaaatattattaaattacttaatggctcttttaactcagtttattttttcttccaggatacgtatagtggtttgatgggtcctctgattacatgccgaaaaggagtcttgaatgaaaagggaagaagaagtgacgttgattatgaatttgctctcttgtttttggtatttaatgagaatgaatcctggtatctggatgacaatattaagaagtatctcaacaaagatccacgagattttaagcgcactgatgattttgaggaaagcaacagaatgcatggtatatccaaagtttaaaaagaagcctatgttgagataagctcataggaattcctgtaaatgtaggaggctcccagcatccttctctgagcctttcctccttcccaggggcacctggactgaagaargtcctctaatgctttccttcagactgaaccagcctagccactgattggctggcagcaaagtcattgaggctttgtactaacttgtagggacatgtatttctgaatcctgggatctctaagctctaagactgtaaagtaattctttaaaaacaaatcatcatttattgtcatatttttataagaatatgccataacttctatttgtttaaatttaagggccaggtttaattgtctctgggatatgaaacactaccatcaaatttctgttttaatgtatctgtgttacttctacataatttaaggtagtttgttggtgggagtaatgtgttcacattgacacatccacagtttctcaccaacagctatttttgaccaaaagtgcacaaaaaggccttgcccaaggtcacaaagctacttgttaatatagattagaatatagtagcctgattccccattcagctactctttcccctaccagttttgctttcttctcctaaagatgtcttagtatgctctccatttttaatgaatgcaggtcatttggttgcaccacaatgcacagaatcaaaagtcagtagacagtggaggagtgggagtcaccatcatgtaaactcagtttgctttggtcattgttaggtcatgagctcagcccgtgtgaagctctcttttatttttggagattcagccaggcttaaactattctcaacaagtgaaatattaagaaaataccttctaagtcactcaatttttatttacataaacttgtttatgccttgatttgttctctgtagagtggtataaatctgactacctctccaatgagactgtatttcccttcataaagagattatgctgaataaacaaacaaaacactgccaccaagatacggctttaaaactgctatttctctgttctcgctctctttgtagaaggatttctcagttatctgaattttgggtctagaatggtaggacactgctaggggtgagtgagattgttgcatgtttacyagacagatgaaaatatcagtgacctaaagatcttctggaaacatttaaaaaatcagcttatcttttaactaaccraaggttattttcttatcaccttttaaagccattaatggaaagatttttgggaatctccatggcctcataatgaacgaagatacaatgacaaactggtatttgttagggataggaagtgaagtggacatacataccatccattatcatgctgagagctttcttttcaaagtaagtataaggaaagtgctttgggaaagacgtttttgaactaacaaattcaatgtatttccagtggaaaataagagttacttggcaataatgcttgtgaggataggtgagaatggaacagaataatgtgattgtaccgtttccctggtggatatttcttttcttttttttttttttttttgagacggagtcttgctctgttgcccagggcggagtgcagtggcacaatctcagctcactgcaagctccacctcccgggttcatgtcattctcctgcctcagcctcccgagtagctgggactacaggtgtgtcccaccacgcctggctaattttttttgtattttttagtagagacggggtttcaccatgttagccaggatggtctcaatctcctgacctcgtgatctgcccgcctcggccctcccacagtgctgagattacaggcgtgagccaccacgccaggcctggctatttcttaatatgtatatgtatattattgtgcttataaaaatctctccaagcctcaggtgagagttttctcattagtgatctggggataactctgaccaccctggaatatgctgttaatattgtatatgaaaccacggacactgacagcattcgtcccttttcctcacccttccttttttctttccctttccttctccccacccttttctttttctgtgtgattagctaacagaatagctctatccagtaaaggagctattttgagctctggcctaagccctgaaactttatcttgacttttgccctagtgagctgggctggaccatgtgtgactttctaccctctagcatcaagctgtaccatatgggtggtgctcactgtacagcagagccatctggggaactatgtaaaaacccaactgccaggcccgacccagacctgctgaatcagaatctccatggaaaggtccaaatagtctgtcatccgaagttctcagtgctttctacaaggaagtggaatagaaaagaacaatcatatccaatgtgtggagaaaactggaattgatcttttctagttagacacgaataaacggtaactttaataaaacatttaatatcctttctcctttgtatatttcaacgttgtttacgacaccaagtattagcctgctatgattagagtttcacatattaaatggctatgctgcttttcagaatttggcttttttaaactcacattttaaaaattatattaaaaatttataaaatttaatacacaaaattataaaaatttacatatacactttaaaaataagatataatttacattgaatacaattcaccatatttagtgtacagttctcttttgataagcacatacagtagtgtaacgaacaacaatcacaatatagaatacttttatttcccccacaaattttcccattgcaccctctagtgtcaactacttccccatacttaacacttgtcaaccactgtctctatagttttgccttttttgaaaggttatgtggaaatcataggttgtagcatcttgaatctggcttgtttgatttaacataggcattcaaattgcatccatcttgttatgtgtatcagtggtttgtttcttgtgactgttgagtagtattccattgtaaggatataatgcagtttgtttatctattctcctgttgaggaacatttgagttattttcaagtttgtttattacaaatcaagtcattacaaacatttgtgcacgtttttgtgtgaacatatgttttcattttccttgagaaaatacctagaagtaggattgctaagccatgtgataagtgtatgtttgatttcataagaaaccaccaaactgttttccaaaaaggcagtatcattttgcatttccaaggaaatatacgagaactccatatgttgcacatccacatatgcagttggtatttttagtttttatttcatttttttcccttaggcattccctccttggggaggggatatagtggtatctcattgtttttcatttacattttcccagtggctaatgatattgagcatcttttcatgtgtttgtttaccatctgtcatctgtaaatctttggtgaagtgtccaaattgtaagcccatttaaaaaaattgggttacttgtttccttattgtagagtttgagggctttatatattctggatacaaatcctttttcagtgatgtgactcacaaatatttgcttccagtttgtggcttatcttttcattctcttaacagctttcaaatagaagttcttaatttttgatgaagtaaaatgaagtacaatttttcttttttctcttttatagatcatacttttggtgtcatgtataaaaaattttggccttactgaaggtcccaaaaaaggtctctgttttcttttagaagtggtatagttttagatttagggctctgatacattttaattttcatatgtggttcaagatatgaaataaggttcatttttttttcatatatatgtccaaatgttccatcaccactcattgaaaagatcatctttttttcccacagaattgactctttacttttgtgaaaatcatattgaccacatatatgtgggtctatgtctgggcggtctcttctgttacactggtttatactctgccctttcttgaatgccacaatgttttgattactttagtattatagtaagtctcaaaatcagatggtgattgttttagctattctagatgtttgccttcccagataaattttagaaataatttgttgattttgatttttaaaatcctgttgggattttgattggtattgcactgaagctatacaatgggttggacagaactgacataacaatattgaggcttccaatccatgaacatggtatatctatcgtttagctcttctttgatttctttcatcagcattttgtagttttcaatatagagatcttgcatatactttgttttatttatttataactaagtatataaaaggctttggtaatagtgtaaatgatagtgtttttattttgatttatagttgtttattgccaatatttagaaatataattgatatttgcatgttgaccttgcatcctgcatctttgctaaactcactttagttccaatagttttcctatagattttagggggattttctatgcagacaatcatgttgtctgtgaatagacatggcttcatttattttcaatctgtatgtcttttatttcttttgtcttactgcaatggctaggacctgtagtgcaattttgaatatgagtggtgaaagtggacatcctcagtttgttcttaatcttacaaggggagcatttagtcattcacctttgaatataaagttagctgcagcttttttgtggatcccattatgaggttgaggaaatttccttctaaatttgctcagagttttgatcatcaacaaatgttaaattctatcaaatggtttttctgcatctattgagatgatcagatgctttttcttctttaatctgttgctgaattacatttattgattktggagtttttaaacactttttcattcccaggataaaccttacttggtcatgatgtattattcctttttgtggaattgatttgctagtattttgttatggatgatggtatctatgttcatgaggagtattgattgtagctttttttcctcacaaagcatttgtttagttttggtatcacagtaatgctggcctcataaaatgagttggaactgttctttcctcttctattttccagaacagtttgtttacaattggtattatttctccattaaatgtttggtagaatttgccaataaagccatctggagtttaatttgttggaatatcttgaagcaattacagtttctttaatagatatagtgctatccaggttatcaatgtattcttgagtaatcttcaggagtttgtgtcttttaagggatttgttcataccatctaagttgtacaatttttggataagaggtgtttgtccagtatttcctttttaatatttgtaagattttagtgatgtcctcactttcattctcagtatttttaatgtgtccttttcccttttcccttggttagtctgtccagagatttgtattagttatctattgctgcataacaaattactctaaacttagagtaattcttggatcaggaatttgggattagtttaactagttggttgattcagaatctttcatgaggaggcaatcaagatgtcgactggagctgcagttttcaaaggtttgactggagctggaggatccacttccaaacttactgatatggttgttaactagagggttcagctcctgatcatgtggataagacatgaaaactggcttcctccagtgagtaatccaagagaagagggtgacagagtatctaacacagaagtaatgataacctaatcttggaattggaatgccagcacttcttccacatgctattgatttcgcataccaacccttatacaatgtaggtaggaaccacaaaggttatgaataccaggaggtggggatcattgtgggccatcatggaagctggctactacagaatttattgattttattgatctgttcaaagaatcagttttagatttctttgacttatctctattgtacttctattcttgattcctgctctttcttatgtccttccttttgcttactgtgggttttatttgtttttgctcttctttctgttcttgctgttctgagcaaagaaggctactagctgttgttttttaaaacgtttttgcagatagataaatcttaccgagaagatgtgtatgatctctttcctgggacattccaaaccattgaactgtttgcagatcacccagggacatggctgctacactgtcatgtgtctgaccacatccatgctggcatggagacaacctacacggtccttcgtaacataggtacggttgtctgtcagtgatgccagatgatggcaccgagcttcctgtagacccccaaaacaggaggcatgacaaaaacccagatatagccctcaacaagctcagagtcaagtaagagagacatatatgtaaatatgtaactataatcaagtatgctatgtgccgtagcagaatgcagagtacagggcttaatagcagcagtaggagtgaatgggtaacagttggaggatatgagccaaagtttcacagaggccatgatgctccagatagactcagtgggtgagcagaagtgggaaagacagctggggcaggaaagcatgtacatgggaatgaagtagcacagtaagaatccagaaatgattggcagatactgatgggataagtcctcgctggtgaaatgaaatgactagtgtcatgaaaagaatccccttctgttgttaataaaacaatgaacttgttttctttgtgcagacaacaggattccttactccaccacatctcctggagtggcatctcacccagccacggtgccatctaacggtaatgataccctctccccatgtaaatgagtcaacatttcacccctcaaaaatgtcaggggcctgacaagtttatctttttcacagaacgacctggcaaagagcagctctatttctttggcaagaatctgggtccaacaggagccaaggcagccttggtcatccttttcatcattggactcctccttctaatcaccacggtgattctctccctcagactctgctctgcaatgaagcagacagattaccagcaagtccagtcctgtgctctccccacggatgctctgtgaaccatctggtctccctcaacaggaaagggtgatgtcccacagctggccagatggcagccaacagggaaactggaccaaggcatcactcaccaaggaaggttgacactgtatcctggatcagccttctgatcctctcaaacatcatccaaagcaatttgcttttatttatttatttttaaatgggctgcgaataatcctcaggtataaaacacagaaaaaggagaatgggcatggctgagaatg

SEQ ID NO: 94046 - DNA, 36712 bp, Homo sapiens
  misc_feature (1)...(36712): n = A,T,C or G
cagcctcctgagcagctgggattacaggtgtgggccaccaacccggctaatttttgtatttttattagagatggggtttcaccatgttggtcaggctagtctcaaactcctgacctcgtgatccacctgcctcgggctcccaaagtgctgagattacaggcgtgagccaccgcgcctggcctatttgcttttaatgtggggcgattataatcaatgctgaaaagaacactcttgcattttaaaacatgcttacttacccaattaattaattcccattggaaaatcttaaagatggttaagatgagtcacaattcagtttcaggaagcaggtaaatgggctggagaaaataaatccagcctcaccaatgccaccctatttagtcctcccaacagccatataaagtagataaaaaatatcactactgtctctttcaaactctgttttcaaaaggtgaggtataagcaatcaagtaaaatggagatggaaaactgaaaaccacgaaaagatcaaggcttgcccatggaacacagataatgtccaagtgataatcattctatgcttgaatcagaagatttggggccatggccaggtgggtggctcatgcctgtaatcccagcactttgggaggccgaggcgggtgggtcacctgggtcaggagttcaagaccagcctcgccaacatggtgaaatactgtttctaataaaagtacaaaaaattagctgggcatggtgatgcacccctgtaatcccagtttcttgggaagctgaggcagggaaattgcttgaacccaggaggcagaggttgcaatgagctgagatcatgccactgcattccagcctgggcgacagagctagactctatcacaaaacaaaacaaaacaaaaagaaagactgggtgtggtggctcacgcctgtaatcccagcactttgggaggccaaggcaggtggatcacctgaggtcaggagttcaagaccagcctagccaacaaggtgaaaacccgtcactactaaacatacaaaaattagccaggcatggtggcatgtgcctgtagtcccaactacttgggaggctgaggcaggagaaccgcttgaacccgggaggcagaagttgtagtgagctgagattgtgccattgcattacagcctgggtgacagagtgagattccgtctcaaaaaaaaaaaaaaaaacaataacaagaagaagatttgggtccatgtctaggagataatgtctagatctcaaacagacctagagtcaaatgcctgccacccctcttactgtatagaaggtaagctactcactttctgggcttgggttcctcatctgtccaatgggaatagctcatagagtcatgaggattaaattagatcatgcttgtgaagcatcaggcatgaatttagctctcttgctttttctctgactccacattgctaatcaagttcagcctcatgacctaattacttcccaaagctcccacctcctaatgcatcagttggggttagaatttcaacacatgaatttgtgggggacacaaacatttagtccataacagaaggaacatgggatcagttaggattagattcagttgcatgtgacaacaaaacaaaacaacagtggtttcaacaacatagcagacaatttgacctcacataaatgaaggctgaggaagtctgaggttgctagtccaaggcttacatggctgtgctccctaaagaccttagaagcgcaggctccttccagctctctgatccaccatcctcatcctcctggcccaagatgggaatgagagtgacagccactccatccaagtctgttcccactttggggcttttgcacttgctgggtttttttcttagaaatcttcatctgagcctctttctctgcctttgagtctcagctttggaatgtggtcaccgtctcagagagggctcccctaaccacatgcctcaggcccctcttgttgacccgccttttattcttcatctcacttatatcacctgtatgtatcacctggttctgatacctaccaaccttctgaccttgggcaatttccttaatttcctcaagagcctcaatttcttcacctgtaaaatggggatataacagcacccataggaaacttacactttagattcatgagagtggttggctcttgagtgttggggagaaaagaaacggtgatatctacagtgtccacagcagagcttagaacaaagtagaatctcaataatatttgtgggattaaggaaaatattatgttaataaactcatcttcagttggtgccactactcaatagtagaatattgctcaacattgattactgagtaacattcaccttgagtctccgagaataaaatcagtagaaaactccctgctttgccaggcgcagtggctgacgcctgtaattccagcactttaggaggctgaggtgggtggattgattgaggccaggagtttgagaccagactggccaacatggtgagaccccagtttcttctaaaaatacaaaaattagctgggtgtggtggcacatgcctataatcccaggtacttgggaggctgaggcaggagaatcatttgaacccaggaggcagaggttgcagtgagccaaggttgcaccactgtactccagcctgggtgatatagcaagactatgtctcaaaaaaaaaaaaaaaaaaaaaaaaaaaagaagaagaagaagaaaaaaaaagaagaagagaaaaagaagaagaaaactctttgctttgaattggggggcatagctgggtgcagtggcccacacctatagttccagctatgcaagaggctgaggctggaggatcacttgagcccaggagttccagtccagtgtgggcaacatggcaagacccttatatcttaaaaaaaaatccctcaaggctgggtgcggtggctcacacctgtaatcctagcattttgggaggccaaggcaggcagatcccttgaggtcaggagctcgagaccaacctggctaacatggtgtaaccctatctctactaaaaatacaaaaaaattggccaggcatggtggcgggtgcctgtaatcccagctactcaggaggctgaggcacaagagtcgcttggacccaggaggcagaggttgcagtgagccgagatcatgccactgcactccagcctgggcgacaaagtgagactcatctcaaaaaataagtaattaattaaaaaaaattaaaaactctcaaaataaaaaaaatgaattgaggggagaaaacttcattctcctgagcatagctaatgatctgggactgatgtgaaacccccaaagagaaaaataagaaatttttttttcctttttcccagtctattccttttagacttgggtttgggagggagataaaaagaatgacatgggacgtggcagggaagtaggctgggggtgaaagttgagatcgatttcataggaaggtgaagcagatctctgaagctcccaacatctttgacctccaaggatctcagaagacttgctcattcttgggcaaggctttcaagatcttcatatctgcctacatcttatccattgcaaatcattctggggaattaggatgtgaaggcagccaggatttggccccatcaaataaagaggtaataagattgcaacccacggggcacagatctccaaagagatggtgctgatgtctctgagcccagaggctcccatggggctgggacccaaaccttggagaatgaggcgctgctcagcgttgctggtgctctggctgggtacagaaaagctggttctgtgagtattaaaaagaaaaacaagcaaccccccactccccggcgctgccaaatggaatgaattgctgcttctagggagaagtgctgctggagtgacacaggaatgcgaaatagaacaagacccaagttcccgcttcctcctccagtgctccgttctctctcacatgcgccccctgctggcagatcctaacaaggaacttgatggcaaagtacaaacatggttcctggagtcccaccccaggtacatgagtcaggtatagaagggttagtttgaagctgacagtaccgtaataacgggcacagcttattaatttgaaaactattagatgaaactacacaaagaaccaagaacaaaaacttgtgttccccagtaccattttgcatcctttgtatccggagtttttctttagctgttgtatatccttcctaacagtgtctttattttataaataactaggaagttacccaagaccacacagtaaggagcagaagcaggatttgaatcaaggctgtgtggctccaaagcccatcctgttttttttttccttttaaaatatatatatatatatatttttaggccaggcgcagtggctcatgcctgtaatcccagctactcgggaggctgaggcaggagagtcgcttgaacccaggaggtggaggctgcagtaagccgagatcgcgccactacactctcacctgggcgacagagtgagaccctgtctcaaaaataaaaataaaaataaaataaaataaaataatttttttttgagacggagtttccctcttgttgcccaggctggagtgcaatggtgtgatctcagctcaccgcaacttccgcctcctgggttcaagcgattctcctgcttcagcctcccgagtagctgggattacaggcacacaccaccatgcccggctaattttttgtatttttagtgcagacggagtttcaccatgttggtcaggctggttttaaactcctgacctcaggtgatccacctgcctcggcctcccaaagtgctgggattacaggcgcgagtcaccgcgcccagctagcaatatatatttttttaattcacattttccatcactccctacaaagcccaatctttttttttttttgagatggagtcttgctctgtcgcccaggctggagtgcagtggcccgatctcggctcactgcaagctctgcctcctgggttcacaccattctcctgcctcagcctcccgagtagctgggactacaggcgcccgccaccaygcccggctaatttttttgtatttttagtagagacggggtttcaccgtgttagccaggatggtctcgatctcctgacctcgtgatccgcccgcctcggcctcccgaagtgttgggattacaggcgtgagccaccacgcccagccaacacgtttttaattaaaaacaaacaaacaaacaaacaaacaaaaaaaacatgatggggtcttgtcatgttgcccagggttgtctggaactcctgagcacaagcgatgcacccacctggcttcccaaagtgccgtgactaaaggtgtgaaccaccttgcctggtcttgatttttattttcttctgagattttttttcccctacaataaacattaattttaattaaaaagtttcggggctgtgcgcagtggctcacacctgtaatcccagcagtttgggaggccgaggcaggaggattgcttgagcccaggagttcgacaccagcctgggcaacatggtgaaactccgccgggcgtggtggtggcgcctgtacctccagttactcagaaggctgaggcgggaggatcgcttgagcccgggaagtcggggttgcagtgatccatgatctccactgcaccccagcctgggcgacagagccaaaccctgcctcaaaaaaaaaaaaaaaaaaaaaaaagacaaaaaattacttagaattttaccacccagaagcaatcacagctaactgcttattgtattttcttccacagcttttttttgtatctaaatatacacatctagagtttataaatgcaactctttagactctctcacccttccaccctcctcaaatactgccaccgttttgaggccggagacaatggaatttgcttacctaaaaagctccgccccttgatggcgtcacacgaaaccaaccacgccccatattgccgcatgcgcactcttaagaggtcgaacggggagggcggcaggggctctggaacggaagtgacgcatggtacttgcgcaaagacgacgaggaggctgcgaaaagttaagggccggaccgcaggctgtgctcgcttccggaagtggcttctgcgacaacatgcttgcggacctcggcttaatcggaaccataggcgaggatgacgaggtgccggtggagcccgagtctgactccggggacgaggaagaggaggtatgagcacgrttctggtctttgggtttccttgactgcttcccttcctcgcgattcctcaggtccctgtccccgaatcctcatcatcccctgccagccccggaagtttcccgaaaaggatctcaccgggaccccaagatcttcctcagtttccccgccactaggttatctctacgtccgcctgcttctttggccatgtcgttccctgtctccttgctgaactcagtatctattcactgaactgatatttaaccacgccctgtgtaagagacggcaggtctcttacaccttgtaagaggtgaagtcagccatggttcctgctcaaggagccatggttagctgtcctttcgtatgttcatcgagccagtgtttattgaatacttaacgcctgctagacttagtgttaagcgttgggggcgtagcaatgaacaaggtgagtgccactctcctgaagcgtatggtggtgtgggggcttgcagacattaagcagtatggcaattaaagaggtattggtgttctgaaaaggatgcttgcccttcaaacattcagcccagatgttgtcccctctgcactctcatctgtccgcctgataggtttatccagatgtcccatggcctctacaaattcaactcctccaaagatgaacttgtgttcactctcatcctgttcccttctcaagccagaaaccttagagttattcttgacagttttttcttcctcaccgccgccagtgctctgcaagctagctcatgaatctctcttaagcttctcccgcctctctccattcacactgtacccaccctagctccggctactgctgtctcatgcttgcacaccagcacacctgcagtccaaacatacttcatcttcatctctttatcttgagcacttccagtgtattcttcgcttagcagcagagggatctctgcgatacagtcacgttagagacctcccttgcttaaaactctccagcctgctggtagagacccccgggcctgtccaccttgcaaagactcctcaggcagcgtctgggtcccgtacactgtcsccatttccccgatgtcccctgtgggcgcgggcggccacccaggcctgctggctgcggccccctctcggacaggccttggytcagcccgctgcgtgggaggtcatgggccagtccccgaggagccaggcccctgtacagtgcccggtcacacccatgatgcggggtgtgtttgtcacacccatgatgcggggggaattgtttgtgtttgtttttcaagaaatgattcaaattgctaaaaacaaaacaaaacaaaacaaaaaaaactctccagcctgctttcacgtggctttcaaggtcctcacgatcttgtcctttccaccttgactttcatctctcacagctctcctcttcatgaccaacactccagtctcattcacttcatttttttttaagacagagtcttgctcggtcgcccagggtggagtgcagtggcgcgatctcggctcaccgcagcctccccctcccgggttcaggcaatcctcctgcctcagcctmcctagtagctgggactacaggcatgcgccaccacgcccggctaatttttgtatttttagtagagacagggtttcaccatattggccaggctggtcttgaactcctgaccttgtgatccacccacctcggcctcccaaagtgctgggattacaggcgtgagccaccacacccgtcttttttgtatttttagtagagactgcgtttcatcatgttggtcaggctggtcttgaactcctgaccttgtctgcgtgccttcgcctcctaaagtgctgggattacaggtgtgagccactgtgcctggccccttcttgctttctatcattctttatctcagccccaaagtcactctgtctcttactcttcccaggggcccattgtgctgggcagacgacaaaaagctttggggaagaaccgcagtgctgatttcaaccctgatttcgttttcactgagaaggaggggacgtacgatggcagctgggccctggctgatgtcatgagccaactcaagaagaaggtgagactgacagtgatggacagctccagactttgggctattaagattggactgtgagtttcagggcctagccctgacctgactgaccatctgtttacattcagcagatactacaactcctttgaaaataactggttaaaaaaaaacaaaagaaaatatctggtatacttttgatgagatgggcacagggatcacaaatgactcactgtcttttttttttttttttttctgagtctgcttgctggggagactcctctttaataccaaacaaagtatgagcacttgccaggtggtctccggtggtgtcactgtgcagtgtccctggttcccacacagcacagccaaagctaccacagatgtcattgtcatctgtttgtttgccaagatcccatgcctttctgtgaatctggttaaactagaagatgcatctaagttattttccatttcatgtcttcaaagagaaatattgcctgtccagaacagtttaatccaggctttgctggtccttactctgattgaagtaaaccagcattgccttttctttttttttttgagacagagtctctctccattgcttaggctggagtgtaatggcgccatctcagctcactgcaacctctgcctcctgggtttaagcgattcttgtgctttagcctcccgagttgctgggattacaggtgcccaccaccacgcccagctaattttttgtagtttttttttgttgtttttgagatggagtctcactctatcacccaggccggagtgcaatggtaccatcttgactcactgcaacctctgcctcctgggttcaagcgattctcctgcctcagcctcttgagtagctgggattacaggcatgagccactgtgctcagccttaccagcactgcattttcaagatcgtctggagaggattaaaaaaatttttttttttgagacggagttttgctcttgttgcccaggctggagtgcaatggcgtgatctcggctcactgccacctccgcctcccaggttcaagcaattctcttgcctcagcctcccgagtagctgggattacaggcatgcaccaccacacccggctaattttgtatttttttagtagagacagggtttctccatgttgaggctggtctcgaactcctgacctcaggtgatctacccacctcggcctcccaaagtgctgggattacaggcgtgagccaccgcgcccggcctaaaatttttatatatataatatgtatatgtattttcagagaaggccaaaattttttctttttcaagttaattatgaagagtttgttctcttattcgatgtttcaatgaaaatttctttttcacctctttatttttatctgcagagggcagccactacattagatgagaagattgagaaagttcgaaagaaaaggaaaacagaggtgagaagaaaagtggctatttttcgttgttagggccyactctttactctcaccacgaccccagcatctctctggaagcccttatagagcggggcatggytggggcaggcgcactcttctgtgtgtttgctgtgaatctgtactgagaatccccacagccgttcattcaggccggagagcttcctatcgctctacttaggttctggatttctagaagtttctcatcaccctcactttaatttttttcccaggataaagaagccaagtctgggaagttggaaaaggagaaagaagcaaaggaaggctctgaaccaaaggagcaggaagaccttcaagagaatgatgaggaaggctcagaagatgaagcctcggagactgactactcatcagctgatgagaacatcctcaccaaagcaggtagacgttacggcggaggtgtcagtaatggggacaggagatcagaaggcrtcctcctttactttgtagggtttcctccactcttctgcacagtttatctttaagctgttctgcctactacattgaactcctttctttcttttttttttttttttaagagatgttggctgggtgcagtggctcatgcctgtaatcccagtactttgggaggctgaggtgggtgtatcgcttgaagccaggagtttgagaccagcctgggcaacatggtaaaaccccatctctactgaaaatacaaaaataagcttggtgtagtggcatgcacctgtaatcccagccactcaggtggctgaggtacgagaatcacttgaaactgggaggcagaggttgcagtgagctgagattgtcccactgaacttaaccctgggccacagaatgagaccctgtctcaaaaaacaaaacaaaagagatgtggtctcactccatccacaggctggagtgcagtagtgcaatcatacctcactggaaggcttgaactcactggcttaagtgatcctcctgctttagcttcctaagtagctgggcctacaggtgcatgcccctgcgcctggctaattttttttttttgtagggacggggtcttgctttgttgctcaggctagtctcaaatttctaggctcgagcagtcctcccgccttgacctctaaaagtgctggcattacaggcgtgagccactgtgcccgctgaatcctttcttttaggttttcttttctcttgggattttgtttgggttgttgtacttcataggtagtttactcttttcccatctagccccatgcggctgccagatgccactgtgatacaaactcatttggggtgacatactcagatgggtccagccacatagtgggtgctcaataagtatttctttcttttttttttttttttttgagatggagtcttactctgtcactcaggctggagtgcaagtggtacaatttcagctcactgcaacctctgcctcccgggtgcaagcaactctcctgtctcagcctcccaagtagctgggactacaggcacacgccaacacacctggctaatttttgtatttttagtagagatggggtttcaccatgttggacaggctggtcccgaactcctgacctcaggtgatccacctgcctcggcctcctaaagtgctgggattttaggcgggagccactgcttccgccctcaataagtatttcttgcagaaatgtgtgctaaagcatcataatacagtgtagtggtcgagagcctggtctctggaccagagtcactgggttagctttctctctgaccttaggcaagttacttcaccatgctgccacaaagtgtcctcatctgtgaaacaaggttgacgatggtcacccctcagaggctgaagtgtggcattggcacttaggacagtgtccagcaggatgcaagtgctttgtaagtctgagccgtggtcatcagctaagtttttctccatagatacactcaaagtaaaggatcggaagaagaagaagaagaaaggacaggtgagcttggggctgcaagacagtatgcagcttgttggcaaaccgaaaggagtttaaggtcgtttgggtttcttggctctttttgttgaattctcttctctcttttggttttctggtgtaggaagcaggagkattttttgaagatgcatctcagtacgatgaaaacctctcgttccaggacatgaacctttcccgccctcttctgaaggtagcagcttcttgtcaaaaattttctttgtagaagcatggtcttgctatgttgtccaagatggtctcaaattcctggcatcaagcaatcctcttgcctcaacctcccagagtgctgggatttgagccactgtgcctggccagtagtggcttattttggcaaccatgggattatngcagccacccctaactggactttctgcttctctctttgcctccctcaactcttgtccatacagttgccagagaactccctttttttttttttttttttttgagayggagtctcactctgtcgcccaggctggagtgcagtggcacaatctcggctcactgcaacctccacctcccgggttcacgccattctcctgcctcagcctccccagcagctgggactacaggcacacgctgccacgccctgctaattttttgtatttttagtagagatggggtttcaccgtgttagccaggatggtctcgatctcctgacctygtgatccgcccgcctcagcctcccaaagtgctgggactacaggcgtgagccaccgcgcccggccgagaactctcttaagcaatgagttccatcgtgtccctcctcttcttctctgagtccttcagtacttcccagtctcactcttcttagaagcctgagtccttatattgacctacaaggctctgccccttctggccctctctgacgacacctcctggcactcgttctgctctggccacactggcctccttgctggccctcaaataggttaggcctcctcttcctcagggcccttgcactttctgttccctctgcctggaaractcttccagaaatcttttggggtgctctctagcttccttcagggttcaactcagtatcccttgctcagtgagaccttccctggcagccctaccgtgaatagcactccccctgctgcccgtctggccgctgcattgttttccgcagcatctctccatatgacatgtgtttgttttttggtctgtttctaccagactgtaagattcctgagggcagggtttttatttcttttatttactgctgtgtcctcagtgtctagagcaccacctcacacatagtaggcgttcagtgaatgtttgtggaaygaatgattggtggggattggtgtggtccccacttgtctggaaacctgccctgtttgtgttgtgctgagacttcccccgctcaaccctgtctgacccagttcttttttcctcaggccattacagccatgggcttcaagcagcccaccccgatccagaaggcgtgcatacctgtgggtctattggggaaggacatctgtgcctgtgcagccactgggacaggtgaaaaggatagggacccagggtgggcagaagggtgttacggccagggctgggctctaggttgacttaccaawggctggtttgctaaataaatattcttggttttttgaactatttcatttttattttttattttgtagagataggggtctcactttgttgtccaggctggtcttgaattcctaggttcaggttcaagcgatcgattttcccatcttggcctcccaaagttctgggattacaggcatgagccactgtgcctggccataaaatttttgtaacacaaaaaagatatactggtgcaattgagagagtaaaggacttttttttttttttttttttttttttttgagacggagtctcgctctgtcgcccaggctggagtgcagtggcgggatctcggctcactgcaagctccgcctcccgggttcacgccattctcctgcctcagcctcccaagtagctgggactacaggcgcccgccactacgcccggctaattttttgtatttttagtagagacggggtttcaccgttttagccgggatggtcttgatctcctgacctcgtgatccgcccgccttggcctcccaaagtgctgggattacaggcgtgagccaccgcgcccggccgagagtaaaggacttttaaatttttaaccactttattttgaagtatttgtagatcagtggcaagttgcaaaaatagtgcatagggtctctcgaatccttcatcaatggtgacatcccacataactgtaggacaaaatcaaaaccaggaaattggcactgatacaacagtgtttcctagactgcagagcttactcagtttactgaaggattaattttttgttttgagatggagtctcactctgtcacccaggctggagtgcggtggcgcaatctcggctcactgcaacctctgcctcctgtgttcaggtgattctcctgcctcagcctccccagtagctgggtttacaggtgcccgccaccacacccggctgatttttgtatttttagtagagasagggtttcaccatgttggccaggctggtctcgaattcctgacctcaagtgatacacctgcctcagcctctcaagagtgctgggatttacaggtgtgagccaccgtgcctggcatactgaaggattaattttgtaagataaacagtgcatgagaggatgtccggtctagtagtgggccacaagtttcaaagggtctgatgaaggtcattttcatttaatcctcttggggtatccctgatctctgtgaccrtggcctcctggccctgccatatcagaggaggaaatttttttttttttttttttgagacagagtctcgctctgttgcccaggctggagtgcagtggcgcaatcttggctcactgcaacctccgcctcccgggttcaagcgattctcctgcctcagcctcctgagtagctgggattacagatacacgccaccatgcccggctaatttttgtatttttagtagagacagggttttactatcttggccaggctggtcttgaacccctgacctcatgatccacctgcctcagcctcccaaagtgctgggattacaggcatgagccactgtgcctggctgtattttttctttttttttttgagacagagttttgctgttgtcacccaggctagagtgcagtggtgcgttctcagctcactgcaacctctgccttcaagtgaatctccttcctcagcctcctgagtagctgggattacaggtgcccaccaccaagcctggctaatttttatatatttagtagagacaggatttcaccatattggccaggctggtctcgaactcctgacctcaggtgattcgcctgccttggcctcacaaagtgctgggattacaggctcccgccaccatgcccagctaagttttttgtatttttagtagaattggggcttcactatgttggccaggctggtcttgaactcctgacctcaggtgatccgcctgcctcggcgtcccaaagtgctgggattacatatgtgagcctgaccatgtgatttgaaagcagaaaaaatattctatgaaaaataagttcctttattttccccaaccagacgtagtttttctgtgctctggtgaaaacctaaccctggagggagctaaacttctwctcattgcttccttgctgtccctccctccaggtaaaactgcygcctttgccctgcctgttttggagcgtctgatttataaaccccgccaggctccagtcacccgcgtgctggtgctagtgcccacccgagagctgggcatccaggtgcactctgtcaccagacagctggcccagttctgcaacatcaccacctgcctggctgtgggtgagtttctggccaagggctgccagcccctgagagactgtggtggggtggaggatggatgtgccccgccatctgttggtgttggtgacaggtgccaggagaggcctttgtgttgattgaatccacttaaaaactggaagactttttttttttttttttttttgagacggaggagtctcgctctgtcgcccaggctggagtgcagtggcgcaatcttggctcactgcaagctccgcctcccgggttcacgccattctcctgcctcagcctcccsagtagctgggactaccgccaccacgcctggctaattttttgtatttttagtagagacaggttttcaccgtgttagccaggatrgtctcgatctcctgacctcgtgatccgcctgycttggcctcccaaagtgctggaattacaggcatgagccaccgcacccagccgacatgttttcatagtgctttaggtgggtgggatttgattgagacttaaccaaccttcacaaatgaaacctgaaaactatgaacatttttttcgtggtactgaacaaatttggggtataatttctgctctgtgagaataatgaatcaaatattactttgggcagcgtttttccaatgaagttatatgatagtgttatctagcctgcattttgccctccttgtgctattggaagtcagaagtgatctttgtctccctgtaacagacacctcatcactttcctcagctgcttctcttagtccttgaatgtttcaggcattctcttttttttttttttttttgagaggaagtctcactctgttgcccaggtgggaatgcaatggcatgatcttggctcactgcaacctccacctcctgggttcaagtgattctcccactgctttccaagtagctggaattataggtgtgcaccaccatgcacagctaatttatgtatttttaatagagatggggtttcgccatgttgggtaggctggtctcgaattcctgacctgaggtgatccacctgccttggcctcccaaagtgctgggattgattacaggcatgagccacctcgcccagcccatgcattctcttctgaagtgcttttgtgtcatcatcattgttgatttttgcacttagcacaattttaatgacatgatctgtctttcccagtgcgtttcygggaaacccatktgcttgggcctttgtcagtcttactctctcagtggttttctctgcatctggcctgaggcctggtgagtggctggtgctcagtcaacacccatgagcarctgacctggccgcctggtggggctctcttctctttgcaggcggcttggatgtgaagtctcaggaagcagctcttcgggcagcgcctgacatcctcatcgccaccccaggccggctcatcgatcacctccacaactgcccttccttccacctgagcagcatcgaggtgctcatcctggacgaggctgacaggtgctcctcacagcctggggcccagggcactgtggggttccaaggcccagaacctggatgtggacctgccacactgcgttattctttgtggctctgggccatggctgttggtgtgcgataccagatcagccacttgtgctggggcctctgcccagccttagcccatgttttcctcttttttctctttctctattatggtggttaagtgataaggctggtcaaatgttggtcctgccacttcctaagggagatttggaaayatttagattctcaaaacaaatcttttctcatttgtaaatgggagataaggacatacgcacaccatagtgttgaggagctgaggagggaggaagaggaagtgccagcgtggctcccacagggcctctgtgactgcagtggggactccctctccccccaccccgccccccagctctctgttcctctctgtgccatctgctcacctctttgctctgggactgaacagaaggaactcttcctgaactctggactgaggctggaggtggggcaggggaaggagctcgcagacagccccagggcatgctaaggttgcaggcccttaatccctgactcttcaccagcttggggaatggcagctccatccttccagctgttctgaattcttagcgtgtcctcctgttttcacattccacagcccgcctgtcgacacagcctggccacaygcccccactttgtggcttctgcatttgccatttcctcagcctggagccatctcctgccccttcaggtttctgttccagttgttatcttgttagtggggcctttgctggctgccctgtgacggtcctgccctgacttgctcctcccgtcctgcctgcattgtcactgagggttcatggagtgccaagtccccctctctccctaggatacagtattcatgaaggggctactgctatactcccatgaacaagggcatgtctagtatatagcaggcgctcagtaaatacttgttgaataaccaattggctgactcccccagaacagaagacccattcctgaggcctaaaggatgaaaaagagatcattttaagccaaggggatgtgatctggtttaggttttaaagggggagggaaactattcaagtatgtacctcaaaagaccaaaaaaggcrgaggaagtatttgagatttagatcaggagacagctctgtgtgatacctggacctagactgtagcctgcactggggagagaaatgctgtaaggggttgggcttgctgaaaacatggaatccaaggaatctcacagattactattatgtataaagagaaagaggatcctttacagtggygtgatctggcagacactatagccaagtgaccaacctcacatccacagttctggaacaaaccggccgtcagtatctcatgatggagcgtgaatgcagggcacagctgtgcccagcagcgctgtccccatgaggatttctctgaatccagttactgagaaataattatacgaatccagactgtgagaaggatgaggggccttttcgytcctttttttttttttttgagtcagggtcttgctttgtcacccaggctggagtgccatggtgtgaacaccagctcattgcagcctctacttcctagactcaggtgatcctcccatctcagtcccccgacgtagctactactacaggcacaygctaccatgcctggcttattttatattaaataaatagagacggggtctcgctatgttgtcaaggctggtcttgaactcctgggcttaagacacccttctgcctcggcttcccaaagttttgggattataggcatgagccacctkgcccggccccagctcatttttgtattttttgtggagatgaggttttgctatgctgcccaggctgagggggcttttctagatgcaggaagactagagacgtggcagccagttgcaaggcaggaactttggttcttgcactaaaacaaaaggtaactataaaataaaacttggcctggcgtagtggctcatgcctataaccccagcactttgggaggccgaggcaggcggatcacctgaggtagggagttcaagaccagcctgaccaacatggagaaaccccatctctactaaaaatacaaaattagccgggtgcggtggctcacgcctgtaatcccagcactttgggaggccaaggcaggcggatcatgaggtcaggagattgagaccatcctggctaacacagtgaaaccctgtctctactaaaaatacaaaaatattagccgggtgtggtggcgggcgcctgtggtcccagctactccggaggctgaggcaggagaatggcgtgaacctgggaggcggagcttgcagtgagcggagatcgcgccactgcactccatcctgggcgacagagcgagactccgtctcaaaaaaaaaaaaaaaaaaaaaaaaaaaattaagtgggtgtggtggtgcatgcctgtaatcccagctattcaggaggctgaggcgggagaatcgcttgaacccgggaggccgagattgtgccattgcactccagcctgggcaacaagagtgaaactccatctcaaaaaaaaaaaaaaaaagacacttggaacctggaggcagctgaaggaatttgaacgtggcctgtrctttagatattcacgcactcgaaagtcttgggtgtgttgatgaagttgtgtttctgtaagagaaggtcctagtgcttaggagttgtgtgctgaaatatttggggtaaggtgttataacatctgtgactgacttgccacaaaaagacaaagcaaatgtggcaaaatgataattcttggtgaaaagataaaataataaaatagatgagtcctaaatgtaaccaatgacaacaaacagcagccggtatgcaatcccgtgtccctcactgtgaccgaagagcactctctccatttctgccatgtctttctctgctcccaggatgctggatgagtactttgaggagcagatgaaggagatcatccgaatgtgttcccaccaccgccagaccatgctcttctcggccaccatgacagacgaggtgggccgagggacttctctgtggcgggtggcaggtgtgcccagagggggccatgcagaggaccctggctgggcttgagggggtttgcctggggtgagcactgcttcctccttccctaccaccttgcagagagctgaggaaacctggctttgtgcttggcaggtgaaagatctggcttctgtctccttgaagaatcctgtccggatatttgtgaacagcaacacagatgtggctcccttyctgcggcaggagttcatccggatccggcctaatcgtgaaggagaccgggaagccatcgtggcaggtggcagcacagggcaagcctgggcagggtgggctggtcagcttccttgagctcgtagtatccatgctgaagtgcttggtttcccctgcgcctctgccgtccagtcttccccagcgcagaggctgcactgcactaatgatgatccgctgcctctcttctccacgggtccttcctccctttgctttatcgcctcaccaatcctctttgtgtcctgttcaactcccaaccacttggcatcagctgctgttgtacccgtcagtccagaccactgttctctgtcgcctggatcgttgcgcagcctcttgctcgagctccctgcttccactcggccttttgtgactctctgcattgcagagcatttacaatgwttgcttgcagaagacattcgtacttattatgtccttatttgaacaccctgcggtggcttccattggtcttagactaaaatccaaacatcttagttttttaggactcttcgggcctggcccttgcctgcccgggatcccagccktggaggcttgctcatggctccagccacattcgcctgcttgcacttttttttttttttctttgaggcagagtcttgctctgtcgcccaggctggagtacactggcacgatcttggctcaatgcagcctttgcctcctgggttcaaacgattctcctgcctcagcctcccgagtagctgggattacaggcacttgccaccacttctggctaatttttgtatttttagtagagatggggtttcaccgtgtttgccaggctggtcttgaactcctggcttcaagtgatctgtcctccttggtctcccaaagtgctgggattacgggcatgagccactacatccagccgcctgcttgcacttctcactataagctggttcctgcctccgggccttcatgtttgccatttcctctgtctagaatcttcccctggatcttcccatggatcatctgccttgtcattcaacctaatgtcacctcttcagagaggccagcccttagctgcttccccctcgtccctgcactctctctcacagcatttttcaccccccaggaattggcttctctgtatccaccctggaatttgagttccacaggacagggacagtgcctgtctatccagtgccaggcacagtgaccatactttgtggatgaggagggggtacatgttgaataagagcctagaaacagctgccagctcagtcctctcttcctgccagctttgttgacgaggaccttcactgaccatgtgatgctgttcacgcaaaccaagaagcaggcccaccgcatgcacatcctcctggggctcatggggctgcaggtgggtgagctccatggcaacttgtcacagacgcagcggctggaggccctcyggtaacatttggggtggggactgaggctcccaccatccttctggggcagagaggatagaaggaagaagaggaccctgagcattctattagaacattagcaggggacacatagcatgatcttggccttgaacattttaacctaaccactgtgaggtcatgtcttagatgtgtttagaactctaacttcatagtcagagatgaccctcatgtccttggatgcttgtccctagcatgggagctgttgtgtggcgtgacagaggaagctggcttggaaaggcaacacatggtctcttcytggaagctttctgagagtggtgaacattcctgggtctgattgaacaagatttagagtcaaagttagcagccattacttgagcatctactttgccaggcactgtgctgcgtgctttccatgtgatttcttgtttagtcctcagagaatggcatcaaggtggttggcaaggaggaaccctttagaactctccacctaaccctgttcatcagtgggtgctgaaaggtgtttgttaaagataggctgatttaaactgagacaattgcctatgctgttagcagatacagaactacgtttgctctgtatgatgggttgttgaagggtgggtgtaaatatcccatgtgctcacatttagaatctatccctatttttttttttttttgagacggagtctcgctctgtcgcccaggctggagtgcagtggcgcaatctyggctyactgcaagctccgcctcccaggttcacgccattctcctgcctcagcctcccaagtagctgggactacaggcgcccgccaccatgcctggctaattttttgtatttttagtagagacggggtttcaccgtgttagcgaggatggtctcgatctcctgacctcgtgatctgcccacctyggcctcccaaagtgctgggattacaggcgtgagccaccgtgcccagcctctatccccattttaatgccctgttctgtcctctgctggctcaggctcttgtggagcattattaggggagggtgtctggatgaacagctgtttgtgactgtttctaggcgttttaaggatgaacagattgacatcctcgtggccactgatgtggcagcccgtggacttgacattgagggggtcaaaacggtgagcagacactatcttccttggacttttggtggaagtctttttgcctcttcncaccccccttcccttgccaggcctgacgttcatttttgaccttctaggtaatcaacttcacaatgcctaataccatcaaacattatgtccaccgggtggggcgaacagcacgtgctggcagggctgggcgctcagtctctctggtgggagaagatgagcggaagatgctgaaggagattgtaaaagctgccaaggcccctgtgaaggccaggatacttccccaaggtgagcaggcacccctgtggcagtgcagaatggctcggtgggcggggcaaggacagagtgtaatggctgagagcaggtactttgcagttcagagccagatttgaattccagccctgctgcttccttgccgagtgaccatgtgcaggtttcacctcacytctctgagcttgcctcctgtgtgtagaagggaattatgacagaattgtaaacacagtgccccatttaggtggaaattgagaagagaaggttgcttggggcaaaattctcactaaactcctctttcccttactgttggtggtggggaagagagagatcagtactcattctttttgggtcctttcattgattttgttcctctgatctgtgggggtcttataaagcacatcctctttaaagtctttttttgttttgttttgttcttgaattcctaggctcaagcaatccacccaccttctgcctcccaaagtgccgggattaacagtaatgagccaccatgcccagccttaaaaatttttaaagttataaaaataatacatatttagcctgagcatggtagctcttgcctataacccagcactttgggaggccaaggcaggaggattgctagaggccaggagttcaagaccaacctgagcaatatagtgagctgcctgtctctaaaaaaaaaaaattagctgggcatggtggtgtgtgcctgtagtcccagctattcagaaggctgaggcaggagatctcttaaatccaggaggttgaggctgcagtgagctatgattgtgccactgcactgcagcctgggcaaaagtgcaagaccctgtctctaaaaaatgaaatgaaaagtacgtatttattgttggaaattagtaaataaaaaaaatgtaattctgtgtcaaagagctcaccactggtagcatttaggtgtatgtcttttcaaaccatttttcctttcttaaatgtcccttttatttttttcaytttcattgtcttcatttaatcagygactagttattgagtcctgctgtgggcctagtgctattgattctgttctaggtgctggggatacagcagggaacaaagcagagctgtggttctgggagaaagagacaataaataagctaacagtagatgtgattgagaacagcaggaggagactgcctcattaagctgttaaggaaaggcctctgcacagctggcattggagctgagtcctgggtgatcggaatgaggcagccatgagaggtctgagggcaaagtgctgagctgagagaacaagggtggaggctgtgaggtaggaacgagcttagtgtgtgagaacaagagaaaggtcaggaggctcaggcgtggtgagcagggacacacagaagatcagagcggtaggcaggggccactctgagtctgggggatatgaagcagagaaggcacacattacagacaccatttcctatgtcagtaaatgcacagctaaattattttcatcagttacacagtattagtagtcacccttattttattttatttaatttatttttgagatggagtcttgctctgttgccaggctggagtgcagtggtgcgatctcggcccattgcaacctctgcgtcccgggttcaagtgatcctcctgcctcagcctcccaagtagctgggactacaggtgcatgccaccacgcccagctaatttttatatttttagtacaggtggggtttcaccatgttgtccaggatggtctcgatctcttgacctcgtgatccacccgccttggcctcccaaagtgctgggattacaggcttgagccactgccttattttgtttaagataaggtcttgctttgttgcccaggctggggtacaggggtgcgatcatagcttactgttgcctcgaactcctgggttcaagcagttcttctcctcagcctcctgagtaggtgggactacaggtgtgtgccaccatgatggctaatttttttttttttttagatggagtctcgctcttttgcccaggctggagtgtagtggtgtcatcttggcttactgcarcctccgcctcgtgggttcaagcagttctcctgcctcagccttctgagtagtagctgggattacaggcgtgtgccccsacacccagctgatttttgtatttttaatagagacggggtttcacagcattggccaagctggtctcaaactcctgacctcaggtgatccacctgccttggcctcccaaagcgtgggattacaggcatgagccactgtgcctggcttttttttttttttttttktagagacagagtctggccacgttgcccaggctggcctcaaattcctgggctcaagcaatcctcccacctcaatctcccagagtgccgggttacaggtgtgagccaccatgcctggcctacccttatttgtaaatcctttttattttctcccattgagatgtcatcctcaaattccgggacaagattgagaaaatggagaaagatgtgtatgcagttctgcagctagaggcggaggaaaaagagatgcagcagtcagaagcccaggtgaggctgcgaggcgggatcttgttcacaaggctgctcagtaagcaagctgctgcatccctkctggtgctgcccttctgaaatgtttctcccatcagagccccaggcatttgcagcccgtggcttcctgtgttagtagatacgggtttcackgcaggcatccttttgttatctctacagatcaatacagcaaagcggctcctggagaaggggaaggaggcagtggtccaagagcccgagaggagctggttccagaccaaagaagagaggaagaaggagaaaagtaagtcagggaggttccgcagaaatctaaatacagaattaccccacaggactcagcagttccatttcctagttctatactgtaaagcagcggtccccaacctttcggcaccaaggaccagtatcgtggaagacaatgtttccacatttggggtgtgggggktgcattagattctcataaggagtgcacaccctagatccctcgcatgcgcacttcacaatagggttagtgctcttatgagaatctaatgctgctgctgatctgacaggaggccaagcacaggtggcaatgcttggttgcccaatgctcacgtcctgctgtgcagcctggttcctaatacgccatggactggaaccrgtatgcagcctgggggttggggaccactgttgtaaaggatgtaaacagggactcaaacagatacttagatgccagtgytctttgaattactgttcataatagcaaaaaggtggaaacaaactatgttcatcaacaagtgaatggataaacaaaatttggggtgtgtgtttatatacacacaatggaatattattcagccatgaagttctgatacatgccataaggatgaaccttgaaaatcttaagctgaatgaaataatccagacacaaagggacaaatactgtctgatttcacttacctgagatatctagctaggcaaattcacagagacagaaatagattatagattacttagggctaggggaaggggggttataggaaattattagtggttgcagagcttctgttttcaatgatgtcagtgagtagcctcctgataggagttttggaaacagatagtggtgatggttgtacaatgttgtgaatgtaagtaatgccactgaattgtatacttaagattgggtaaaatggcagcctttgttttatatgtgtatatataaccacaataaaaataattttaaaaaagttaggagatatttaatacagatttcctctccatctccctttaaaaaagacccaaaacacttataagttcacattgttctatgcctcgccttttcacttaattttgaagcttagagatatgttttatataggcccacatatgctgccctttttgttttttgttttcagacggagtcttgctctgtcactgaggctggagtgcagtggcgcaatctcggctcactgcaagctctgcctcctgggttcaccmcattctcctgcctcagcctcctgagtagctgggactacaggtgcctgccaccgcacctgggtaattttttgtatttttagtagagatgggatttcaccgtgttagccaggatggtctcgatctcctgacctcgtgatccgcctgccttggcctcccaaagtgctgggattacaggtgtgagccactgcactcggccccctttttgttttttttaatggcttcatgttcttccatcatatgagtagattgttgagggacattgaggttgtttacaatcatttgtcatccagcctgggcagcatggcaaaaccccatctctactaaaaatcaaaaaattagccagacatggtggtgcatgcctatagtccaactacttgagaggctgaggtaggaggatcacctgagcctggggaggtcaaggttgcagtgagctaagattctgccactgaactgcagcctgggcggcagaatgagaccccgactcaaaccaccaccaccaacaacaaaaaacccaaaaaataatcatttgtcattacaaacaagtgatgtagggaataaccttgcacatatgcccttttacaattaagcaagtgtatatttggcttgcaggattaattcctaaaagtggaatagtgggtcagaggatatttgtatttctagttttgttagaggttgcaaaatttccctcctagagggtataccagcagttttagaaatgctgtctatatttgatgggacaaaataagggtgtatataacttaaatttctgataaaaatagagttataactgtattggtgggtaaagtagtaaagtgacctaaatcttcatccttcatagcaggaggtttgtaatgagtatcttaagtggattgagaaatagtcaaaaaagcatgttatttagtgagatggaggtaatcagtggaagaagtgcttgcggcttttcttttcttttttttttttgaggcagggtctcgctctgtcgcccaggctggagtgcagtggcgygatctcagctcactgcagcctccccttcctaagttcaagcaattctctcacctcagcctcccragtagctgggattacaggtgcaccaccatgcccagctaatttttgtatttttagtagtcggggtttcaccatgttggccatgctgatcccaaactcctgacctcaggtgatccacccacctcagcctcccaaagtgctgagactacaggcacgarctactgcactcggccaagaagtgcttgccgcttttcattttaatctgctaacttaccaattgaaaacgtgcacttcttatcgtaagcttaaaaaaagataaaatcatccctgaaatcttatgctttcttctcatcccagttgccaaagctctgcaggaatttgacttggccttaagaggaaagaagaaaaggaagaagtttatgaaggatgccaaaaaaaagggggagatgacagtgagtggcctcccttttggagtttgggcccactyggtggggtgggtcagagtggcctggtgtgttccacactcacacctccccactccccctaggcagaggaaaggtctcagtttgaaatcctcaaggcgcagatgtttgctgaacggctagyraagaggaatcgcagagccaagcgggcccgagcaatgcccgaggaggagccagtgagaggtcctggtaggtgaatggggagcccaaaggagcttgtacaaggttttccctgaaacctgtgctttgggtcagggagaaaatctgagggatgatgacagtagcccacattatttgagtaattagtatgtaccaatgtgtacagctatccctccacggtctaaggggcgcagtgaccttgtggttgktgagaactaggatttgaacgccagcttttctgactcyggagcctaaggcctcaccagctgctacttggaggagctggtgaggacagaatgaaratagtctttggatgccagagtatccactgaacttggaatcattaccttgaacttaaggggatttaggagcttgggccaaagacaaccatatgtaacccattctctctgtgcacagccaagaagcaaaagcaggggaagaaatctgtatttgatgaagaactcaccaacacaagcaagaaggccctgaaacagtatcgagctrggtaggattttaagtcatcatggagcccttggtattctttttttttgagacggagtctcgctctgtcgcccagggtggagtgcagtggtgcatcttagctcactgcaagctccacctcctgggttcaagcaattctcctgcctcagtctcccaagaagctgggactataggcgcacgccaccatgcccaactaatttttgtatttttagtagagatggggtttcaccatgtttgccaggatggtctcgatctcttgacctcctgatccacccgcctcagcctcccaaagtgctgggattacaggcttgagccaccgtgcccggcgagcccttggtattctaatggaagctatgagtcttctgcctccttccccatttccagtttttgcacacctatagctttatactatgtaaattcaagggtacctgtctgttctccaccccccacccctctcagagccacctgaggatcccaaggtgagaacaggagaggggtgttcagttagcactgttcctgccttggaggtgaaatagtacattgttgggttcagaaatggagctttccttcaggggagtgataactctttcatctcaagttccatcctgcagaaccccagagaatcctggcttgctcttaggaatatgttgtcccacaccattttccccagcccaaggttggggcaggggcagactaagcttcccaagtagtggtatatacctaagaagggcctcttccaaccttgttttaaaattgggccctgacttccagaaacacgttatcaggtggaaacacataaaggcttagaacttagggcctgaaaatgatgcatcccagagatgctactgcttcatgtaggagctggggagggtgggggtgagacaacacccatttgttcaacagtttgctcatttcagcatgtcatcttctctcacagcccttcctttgaagaaaggaaacagttgggcttgccccaccagagacgaggaggaaactttaaatctaaatccaggtgatactggctgttttggaggggcataggttttgggattagagataaaaacctttcatggaaaagaagcttctccatcctcattctggtcttaactctgattttcttacagatacaagaggaggaagtagctgtcgtggcctgaagaaattcatgggggcagcccttaaatcccttccctgtgggaagtcatcctggctggtctgtcttttctccatttgtttaaaaaaaaaacaaaaacaaaaaacaacactttggtgtggtggtatggtacgtagctattttcctaagcatgtctgtcaatctcccttcttgctgattagctttcatatgactatattaaatggaagtatttttgggaaaagagaaaccaatccaagtgtatatcttattactatctcttcctcaatggcaaatgtgcccacagtctactagcttggtatcaccacatacagttggaatgcataatctttatgcttgtagaggaacagggtatggagtgaggaaattcttggtagaagttctcttctagcctggggaacataacaagaccctgtctcttaaaaaaaaacaacaacaacagaaaagttctcttctgttgatactctagaactaagagctaaatgatagctgaagaagatagctaaatgataactcttagttctaaaacatcaacaggggagaactttagcatgaatgccaaccatgcaccagatattctgtgtgctgaatagaatccagtcaactcactgcactcctgtgaggcaggcagtgatatcctcattttccaataaacagaggcttggaaagactaactttccagagttgcacagctgggaattcaggttttcaaccaacatctacttgaaccctcaccttacctcttgctgctgtgctgtggaaatgctgctggagaaatggaagcccgaaaaggacagaaggagccttgacaccataaattagttacttgctgcaaaaaccagagtctcttgtcctccaggctggagtgcaatgacacgatcttggctcattgcaacctccacctcccgggttcaagcgaatctcctgcctcagcctcccaaataccggtgattacaggtgcccgctaccatgcctggctaatttttgtatttttaggagagacagggtttcaccatgttggccaggctggtcttgaactcctgacctcaggtgatccaccacctcagcctcccaaagtgctgggattacaggcttgaaccactgtacctggccaaaaaccagttttgatcctgtaagaacgtcggttctcatccttttctgactcagaatgagatgaaagctgtggggccccacctgggaaaactgtatagtttgttataatttcagggagtacttaccaccctacccccagcttaaaaattataagttatccagtagcacataccctagatactaaagagtgtgttcaaagctattcattcaggctgcacctaagtcaccaacagagggtccaattcagaaaatgatggcacaactgtgtgatggagtacagttcagactactgtcttactggattttacagaaagtaggttattaggctaaaaaagccaagtgcagaactgtgtactttttcttttccttttcctttttttgaagcagggtctcactcttgcccaggctggagtgcagtggcttcactgctcactgcaacctcgacctccccaggctcaggtgatcctcctacctcagcctttggagtagctaggactacaagtgcaagcaacaacacctggcttatttttgtatttttttttttgtggagatggtttcgccctgttgcccaggctggtcttgaactcctgggctcaggccatctgcccartgtggcctcccaaagtgctgggattacagatgtgagccaccatgcctggcctaagggatgtgtattgcatgtgcataagttctctctgggaggactcaggaagttaacagggtttgcctctggagaaagaaacttcaggtatacccttttgtacaggctgaaaaaatgttctttttaccgtgggtaaaaatgattcattcaccagctaaataaaaatcctgtatcacaaaaacaaaatcacagcctcactgtagacagtgccttccctgtgcccgtcttcactgtctttggctgagttgcttctgaaaattgaggatacacgtggaccactgattttctcaatcatygtttttaattggctttataagctaaagkgcatagtaaagacaaaaaaaggaaatgcatacataggaaagggacacttaraaaggacctgagatacctaaatgtctgttctaaggaacactggaaggagggaatgcagatgcaggcagcaggcctgggtctggcttctggcctgggtttggagcctgcaraagctgctggcatgctagctctacccagggaacagctccaagagggagtgttgggatgaaggatcacacttgggataggtgctgctggtaccaaatgtgattttagctccattcagggcccaggggtaaccagcagtgccaccaaacctgtcagcaggtaaagaaacttctaccatcccaaagtgcaggttacaggaaaggggtcactccttaatgacgacctgggcctgctgcataaggcccatcttatgcagcatgtgggctgtcccatcttccccactctcagtgactatgtaactgtgtcagggtgagttggtgcagtcttttgtcttatcacgtgcctccatctcctggaggcagggtgcccaaggagggcagggaggggttcttgtgctcctttaagggataagcagttcataaacaactatgggcctctgtttattatgagagttagtctgcaaattagggcctggcaattagaatcggtctgcatcaatgagctcatactctgttcctggggaacaatgtagaataaacatctgaccaagtaaagacccagagataccactaggtggccctaggtggaagccccaaacatgttccagggagtctgtccactaatttgcaggagagaaggggtgagatttgttaactttgctctcagttctggagataaagtgcttactctagcgcaggggtaaatctagaaacaaatgtgggtgagccctaaaagtggatccttaagtaggtgctaagactaaaaagaatgatttttttttttgagacagagtcttgctcctgtcgcccagactggagtgcaatggcatgatctcagctcactgcaacctccgcctcctgggtttaagcgattcttctgcctcagcctcccaagtagctgggattacaggcgcccgccataacgcccagctaatttttgtatttttagtagagacggggtttcgccatgttggtcaggctggtctcgaactcctgacctcgtgatccgcctgcctcggcctcccaaagtgctgggattacaggcgtaagccactgcgcccagcctaaaaaggatgataataaaaaacaaacttcagttccttcattagggagctggccccagtcattcagtggcgagggcaaaaggcagtggtgtaccatcttcctacatcatcccctggatctcctcaaagttcatcaggttgttggccgtgtcagaccaggcagcatgctgggctccatccatttcagaagcaagctggttgcttctttccagagtatgatttgtgccaccaatcacttccttacagtcaggacacgtgcccctctccatggctcccccacaatcgccaatcacatagatatggccattgcggcacttgaaccagtgaccacgaggataacctatggcactgacaatctgcactcgctcttcctctgagatgcccaggccagagcagggaagggtggctttcagagcttccatcttttcctgcacaagttgttcatcctcttgggtgaacttacatgttttctcaaggatattctggacactatagacctctactgctatgctatctttcaccttcttctctgctatcttgtagcgggtcagaaggttcaccaggtatgtgagcctctggatttcacttcggaggtcacttagttcctggctagtgaagctcaagcgcttcttggccagccactcatggacctgttctagtcgagtcctcactcttttctcttctaagacatgcatctttttcagggaatcccacaggctggccaggtggtcatagaagctgatgtaattctcaaccagacccaggtccttcactgacagatttttctgggccagcttctcctttaacatcaggaagtcttcaggaagcagctggtggaggaggctcttcctctccagcagggccttaagccgttcctggctggttgctatttcccctgctgagccctggatcttttccttgatgatttcaatctcttctagccgctgttttatgctagttccatacctcaggtttttgcggatgggcacctggcagatagggcagactttcaatctgatggcgacttcatcatccttctgttcattcatgtagcggtctagggcttgcacctcaaagatgtggctgcagtcttccagctgcacaaagcrggcatcaggctcatcctcaaagccaaagaatatttgggtgacctcatccatgtggcagatccggcatttcttggggcatggctccccacagagaccaatgcaggggtggccacaaactagcagcttagtacaaggcacatagcatgggggtcggttgcagggctcagagcagagtttggtgcactggtagtgctggcagcgccagacacagggttccacrcagggactacacagctccccacatttcttcttgcactggctgtggacacagcggttctgacaggtccgctggcagggtgggcactcaccaatgcatggttcctggcacttgtgtgagcagataagcaggcgcttgcagggctgctgacagcgttcatggaaacgcccttcgaagcagctgtggcaggagcctgggcaaggatgcccgcagtccaagatagtgccacactttgtggtacacttgactagcagaccaccatacaggaggccttccacatgaccacattttaccggttgactgtgcccacacttgagttttatggtgaccatttctgaacacarctgcacacagtcctcaccacatgggtggctgcatctgtgcccacatctcagagacttggagcaaggctcctggcagcagaaatctgactcaggcacggaacaagggaccatttgttcatggccgcaccgaggaatgrttttgggcaccttcacctgacaaggctgacactcctggaagcaaacaaggggacaccggtgcccttcctgacagatgaccttctggcatggcttcatgcattggaactccttgtgtgaagagtcataagggtggcaggcacgggtgcagacatgcccacagcycaggcggaactcgcagggcaggctgcagcctccttcgggtactttttggaagtcagaagctttggatactaaggtgtgggtttcagggtggttctggcagcagagccggagyatggggcctatttgattgttctctcgaagtgtatgaatgatcttgctccacaggggcaccttggccagcatctgcatgtttccgatgcagtacattcccttcttggctcgggacaaggccacacagatgcggttggatatctgcagaaaacccaccttgccttcttggttgctccgcactagcgagagraggatgatgtcattctcttccccttggtatttgtccacaacatggaccctgacgccagcaaatgtcttggcaggcatcagtttgcgcagrcagaagagctgcccggtataggtagtgaggatggtgatctgggaaggcaggtattcctggcacaggaagtacttgcacagctctaccacaaagtgagcctcatgctggttctgatggcttttgccctcttggatttcctgttcaggaaagttgtgttctacaaagaaaaggttggaagacaccccctgacagggaaaagaagtgacatgttaaaaggttcactcatggcacttgtttttttcttcctctcttgacatgcactggccacttactctgctccagagagagaccttggaaagctttttgtccactcaacatcactatctttagttctttagttagtcattatgtgcttcattttggggccacagcaagttatgaaaataaaagattatgtctctttcagttttcaagatacttgtttgatgttaatatttaaaaaagctggctgggtacagaggctcacgtctgtaatcccagcactttgagaggccgaggtgggtggatcacctgaggtcaggagtttgagaccagcctggcccacatg

SEQ ID NO: 94047 - DNA, 79857 bp, Homo sapiens
  misc_feature (1)...(79857): n = A,T,C or G
cagaggttgcagtgagttgagatcgcaccactgtggcgacagagtaagactgtttcaaaaaaaagaaaaaaaagggggtttgccaaaaagccccttttcatcccatctctgccacatactagctgtgtaaatttaccacttcacttcaatccctggagcctccgtttctacatctctaaacctacttcacgaggctctgataaaatgcttagtatagtgcctcacatacaataagcacttaaataatagttcaataatattgtgtgaaaagggcaacaaggaaaaatggagaaattcatatggttaactatggggattagaattctgatgttatgtgctgtacagcacatgtacatttaaaaatatgggaaagttggccaggcgcagtggctcatgcctgtaatcccagcactttgggaggctgaggcgggcagatcacgaggtcaggagatcaagaccatcctggctaacatggtgaaaccccatcgctactaaaaatacaaaaaattagccgggtgtggcggtgggcgcctgtagtcccagttattcgggaggctgaggtaggagaatggcgtgaacccaggaggcggagcttgcagtgagctgagattgcaccactgcactccagcctgggtgatagagcaagactctgtctcaaaaaaaaaaaaaaatatatatatatatgtatatatatgggtaagttactgaatttggggaagttcttcaaggtgaataaagaagtttattcttgcaaaccaatttattccatgagataggaaacatgatctttggagacattgactcacatgcttacagttctataaccagagagagaaaatatttttgttcaaattcaggttaggaaattctcagagaaggattctaaatggtcctgcaggtccatccctagaccaatcaccttaaccaggtgcagtaggcccctccaataagtccatgtcctaatccctggagcctgtgaactttatgtctcaggagagactctgtagatgtgattaagggtacaggccttgagacagggatattatcctgggttgtccaggttggccaatctaatgatgggcccttaaacacagagaagcttttctgggggtcagaggcctgatgacagcagaagagttaaagagatgcgacattgctggctttgaagaggttggaaggaggtaaccagcaaggaatgcagggggcccctaacaaaggcaaggaggtgaattccctgctagaggctttaggagggtttgcagccctggtgacaccttgattttagtccagtgagacctgtgtgagactactgaactatagaactgtaaaacaatactttttttttttttttgacatggagtctcactgtgttgcccaggctggagtgcagtggcgtgatcttggctcactgcaagctctgcctcccaggttcacgccattctcctgcctcggcctcccgggtagctgggactacaggtacccgccaccacgcccggttaattttttgtatttttactagagacagggcttcaccatgttagccaggatggtctcaatctcctgaactcgtgatccgcccgcctcggcctcccaaagtgctgggattacagaagtgagccattgcgcctggccacatttttgttgttttaagccactaaaattgtggtaatttgttaaggcagcaatagggaactaatatactagagaagcaaggcagaaaccaggttcctaggtttcagttcctccccagttctctctgcctcatctgctgtgagacagcttgctgaatgagatcccctacaccctcccccacagcacactcacctcattccacaggagtaaactgcgtgagagaatgaaatagacgatgtagtgataagatgtagagctctgattctgcctgagctcctagttccagtcatttttttttttgaggtggagtgtcactgtgtcacccaggctggaatgcggtgacgtgattttggctcactgaaacttccgcctcccgggttcaagcaattctcctgcctcagcctcccgagtggctgggattacaggctctcaccaccacccccagctaatttttgtgtttttagtagagacgaggtttcaccatgttggccaggctggtcttgaactcctgaccccaactgatccacccatctcggcctcccaaagtgcttggattacaggctagagccactgcgcccagacattcagtcatttttgaggcaagttagctcagaattaaatttctgtccttacaattagctatcctgcctaaatcataaagctatggtgagagagggatggttgcaggagaagaggtgttttttgttgttgttgttttttttttttgagatagagtctcactctgttgcccaggctgtagtgcagtggcgcgatcttggcttgctgcaacctctgcctcccaggttcaaacaattctcctgcctcagcctccccagtagctaggactacaggcgcgtgccagcacgcctggctaattttttgtatttttagtagagacggggtttcaccgtgttagccaggatggtctccatctcctgacctcgtgatccacccacttcggcctcccaaagtgctgggattacaggtgtgaggcaccgcacctggccgagaagaggtttttttaaaggccttttgatatccgataatggtttaatgtgattcccacaggaagccactgaagaacacattattcttagatgcacaaagactcttttttgtgggaaatccatttagccacttattagttaaattgatttcccacaaacaagagtgttctgaacttaaaacatgaaagccgaaattggttttttttcttctttttttttttttttagttggagttttgctcttgccgcccaggctggagtgcagtggcgcgatctcggctcactgcaacctctgcctcccgggttcaagcgattctcctgcctcagcctcccgagtagctgggattacaggcacgcgccacaccaggctaattttttttttgtattcttagtagagatggggtttcaccatgtttgtcaggctggtcttgaactcctgacctcaggtgacccgcccacctcggccttccaaagtgctgggattacaggcgtgagccaccgggcctggctctttttttttttttttttttttgagacggagttttgctcctgttgccaaggctggaatgcaatggtgcaatctcggctcaccgcaacctctgcctcccgggttcaagcaattctcctgcctcagcctcccgagtagctgggattacaggcgtgcaccatcacgcccagctaatttttgtatttttagtagagatggggtttctccatgttggtcaggctggtcttgaactcccgacatcaggtgatatgcccaccttggcctcctgaagtactgggattacaggcatgagccaccgtgcccggccttctgttttctttagaagaaaacaaaagctccatcaacagaggggtgagaagcaaagtgggtaatatctgactattatgtaatattatctttggtagaaagtcaagagacttggaataaaactgttttttggagttctgaaatttttgtcttattttatctctgaaaaattttttttttgaaaataatcaaagaggagatgttcacaaaacctgtcaagatgccaaaacaccactaatggatctttaggtcttggcttacttcatccatttgttcacagatatttattaagcacctgccatttgtcctgctgaacaaatcaagcatgttccccgcagccattgtgtacagctaagcaggtgaatggcacccactggagttgcgtagtgcacaacttccactactgctggtggttcttgtcctcatggagattaaatttagtaacttctaggaagtctttctcgaatctctatcctcttgctcagactggaaaaagtgctcttattatgttttcttttctcttttctctttttttttttttgacacagggcctcactctgtcacttaggctggagtgcggtggcacgatcacagttcactgcagtccccacctcccaagcttaggtgatcctcctactgcagcctcccaagtagttggggccacaggtatgcaccaccacgacaggcaagctaatttttttgtattttttgtagagactgggttttgccgtgttgcccaggctggccttgaactcctgacctcaagtgatctgcccgtctcctgcctcagcctcctgagtagctgggattacaggaatgcaccaccacgcccggttaatttttgtatttttagtagagacggggtttctccatgttggtcaggctggtcttgaactcctgacctcaagtgatccgcctgccttggcctcccaaagtgctggaattacaggcgtgagccacggtgcctggcctctcctcacctgctttaattctttactcaaatgtcacctttttactttgaggtttacttttacctttggaggtttggagtagaggagggatactatctgtctaaaaagaaaaacaacatttagaaatataacagtatgggccgggcatggtggctcaggcctgtaatcccaggactgtgggaggccaagatgggcggatcacttgaggtcaggagttcgagaccagcctggctaacatggtgaaaccccgccccccacccgtctctactaaaaatacaaaaattttcccagggtggtggcgggtgcctgtaataacagctacttggggggctgaggcaggagaatcacttcagcctgggaggaggaggctgcagtgagccgagattgcgccactgcattccagcctgggcgacagagtcagactctgtctcaaaaaaaaaaaagaacggtatgagcaaagagtgagtaaggcagttatcagatgtctactttgccaggaatcaggctacagcaaataaaggtttatacataatattgataataaatgcccagctcttcccctgtaaaactccaatactctaagatttttttcatgaacaccgccccccgctgctccgacccctgcttttttatttatttatttatttatttggtagagatgaggtctcactatgttgaccaggctggtctcgaactcccagctcaagcgatcctcctgcttctgcttcctaaagtgctgggattacaccgcgctcggtcctgaacacacattttgtttgtttgtttgtttgtttacaaaacccctggagaacccgcgtattctaacctgggctggtttttgtatttttgcaaaataacaccccacacattctcgtatcagcgtgcagatttttttgcacccagtttggttgtttgcggccataagcttttctttaagcctttccaacccgtccttctagagaaagtgtcttcataaggaagtcacactgctcacgcctgtaatcccaacactttgggaggccgaggcgggtggatcactaggtccggagatcgagaccatcctggaaaacacagtgaaaccccgtctctactaaaaatacaaaaaattagccgggcgtagtggtgggtgcctgtagtcccagctactccgaaggctgaggcaggagaatggcgtgaacccgggaggcggaatttgcagtgggccgagatcgcgccactgcactccagcctgggcgacagagtgagactccgtctcaaaaaaaaaaaaaaaataaataaataaaaaataaataaaaggaagtgacactggataattaagagacacaccattgcgcctttaacacatattcacacccagcactgtcacatccatcgtgccttgaggacaggcataaatttacggccttcctcctgcgctcccggcctgctcctagcctttgactagagcctgcgcagcatcccagtcccaggctagggcccaccggtgccgcgcagcctcctggaagctgtggggagtagcgttcctccgctccagaactacaactcccagcaggccttgctcctctccacctccctcgcagcgcatggcctgccgggagggggcaggtagccggcgggcccggtccaatgggtgccggcttccgaggagagggcggaggagaggaggaaggaggcgaactgtgggccccggccccattcattgccgtggccggcgggcactggggccccgtgttttcagagtcatggaggcgctaattcctgtcataaacaagctccaggacgtcttcaacacggtgggcgccgacatcatccagctgcctcaaatcgtcgtagtgggaacgcaggtgagagcagcaggcggcgttcgctcgggccagaccccggccgcaggcctggtcggtgctgcggcagtgcccactcccgcgccagcgcccactcccgcgccagcctttggggcctgtgggaggagggccttgctgggggccccagggctctccgggctctgccgcacccgccctcccggggcagcgttgcatcaaggcggagaatccggggcccggccaggggcggagccggcgcggcgrgcctggctagcccggcgggtcccggggacaggagagggaaggatggggccggcgggcggaactggagtccgctgggaccgggcgcggcctcgtccgcgtgccgctgcctccaagggcacctgggggacgcgcggggcactcgggtctcgctgggctcggtgggctggctgttcccatcactgttggctttcgtgagacgggtgttttatttccctccttgccttgcccagggactgcggagttagttttggaatcgckctgttgaggctgagagacgctacggtgcgtgagcgccagtgttttcctgcagtataattccaccaggtttcgagaacgccgaagcagcatttwaaaaaaagaaaaacaaaacgtgtatctagagttctgcgggtgttgggaaggaatatccgatttttctgcgtargctgtgctttttgtcttccacagttttgtgatcgtgacctaaattgggcatcagtttctctggtcttctcatagctaactcatttttttttgaaygcagaaatgttggcaaaataactgttatttctagagtgacagaggagaagtataattttccttttctctgctacttcgattagagttcagagaaacggattttagaaattagtatattgatattaagtgctttcatttcttaatagtatcttttctattgagaaggagcggtttccccatcattttccakgaggtacatagtatagggtataagtgctatcagaaggaacttactgttcaaagtattagtggctatccaaacactggaaactatagacaccctgtactcgtttgtttgtttgtttgtttttttggcttttaaatagttgaagcaatagaaattgttttagaaacacatttccttggtctgcgataggattgggaaagattctgctcaatcttgcytacgtattctagtatttgtaacaatatttgtaatgtttggagactcagaagcatcaaacaaattacgaggattattttttattgaacataattttgttcagtctgggacatatagtaagtgctctgtaaatattttgagtaaatattgctcactctaaccacaatgttttaaaacactgggacttttatcatcaaaactaacctgtttttgtaaaaagttagagataatataaattaagtctttgatagtaagtgattcagaagtgtcttctagctgcacactagaaactttccacatacttttaaaagagagtctcagtgctttttaagcatgaggaagtaaaagaattagggatatagtgtgtcagcataaatagtttaaaatcaataagttgtttttttctttttacacaaaatagagtttattttggtcagtaaacctgttggcaaaatacagagtggcaggagagaaaagtaaagatcccatccttctgaaagccattaacatgtgcaaaaaccatcctagtactgacagttatatgctatatttgcatgttggtgtttgaaatttctcaagaggtcagtttttctacttgatttaatgagggttatttccatctaagttcttattagctgataatcagtcttttactcaagtacagaagaaatacagaatagaaattatccgaggtaggcagatcacttgattccaggagttcaagaccagcctgggcaacgtggggaaactccatctttacgaaaaatacgaaaattagctgggcatggtggtgcgaacctgtagtcccagctactctgcaggctgaggtgggaggatcacctgagcctgggaggttgaggctgtggtgcgtgcaggagtgcatgtcactgcaccccagcagaaagagagagaatagaaactattttctccccacaccgccccccccgcccctattttctccccacaccgcccccccgcccccgccttttttgtagtgtgttggggaaacaagaatctcttcttggtttgaatactagtataccattactttgtgatgtctgccatttttactctttggtgttgtgtaacatatatgtatacctcacatttatatttaatgaagtaattgtagtgagtgagttccagacatataagtgttctgtacttagttctgcctagtatacctatcggcagtaattgtgtcttcagaatacaggtataaattagccaggtgctatggtgtgtagtgtgtgccggtagtcccagctacttgggaagattgcctgagtccaggagtttgaggctgcagtgagctatgattctgcgatggcactccagcctgggcgacagagtgagaccctgattcttccaaaaaaaaattaaaaaacaacttcaagtgtagtctctatcctacatattatccataccttaaatggcttcagtttctatcttgttgaactttttggaacagtgattctcagacttgagtgtgtattaagaatcactttggttttttttttttgagaccgagtttcgctcttgttgcccaggctagagtgcagtgccatgatcttggttcactgcaacctctgcctcccggcttcaagtgattctcctgcctcagcctcccacatagctgggattacaggcatgcaccaccacgcccggctaattttgtatttttagtagagacagagtttctccatgttggtcaggctggtatccaactcccgacctcaggtgatccacccgtctcggcctcccaaagtgctgggattacaggtgtgaaccaccccgcctggcytaagaatcactttgaaactaagtttcctggatcctgtctccagagattttgattttataagcctgggttgggtgagggaccataggtgattctgatacagatggttcctagatcctaatttgaaaaacatattagtgaatcattggattttaaaatgcatgatactggaaaaagcaggaaaattaggggaggttgaatctatggcatactaccatccagtaccatgctgactttggtggcattcttgctttaatatatcacttcccaggcaaccattgctgacccctaaatgttttaaactttggttttatgaaatgcccaagtaacactcatttgggggctagggacttggaggagtggaggtgagggaatcctgtttacagctatcagtcattcacatgttttatgtgttagctaaataaattgcttttattttttctagtagagaccatctgtgtgaaatgaacagacacagtggggagagagagaaggctgatgatacttttagaccatggtgtaactttgcaagtagaggagataagacttaaaacaacttttgtgactcaacttgggaaatttaatcctatttcttaaattaagaattggaaaggggagccctccaggtatgtaatctaaactaccacccaatataggtatccgaatacagatgacattaacctgagactctggcttagtgttcctagtaatgtactttacacttttccttttatttcagtgatttcagcattctatcttcagtaattcagacaaatgtaaaaggaaaaacaatttggattttttatttttatttttttagggtctggctctttcacccaggctggagtgcagtggcataatccatagctcactgtaacctcaaattcctgggctcaagcagtcctcttgcctcagcctcctgagtagctgggactacaggcacgcatctggctaatttttttttttaaatttaaaatcgctgccttactatgttgccaaggctggtctcaaactcctgggctcaaatgatcctcttgccttggcctcccaaagtgctaggagtataggtgtgagccactgcacctagcctaaaaataatttggattttattttattttattatttatttttttagagatggagtcttgctctgttgtccaggctggagtgcagtggtgcgatctcaactcactgcaacctccgcttcccgagttcaagtgattctcctgcctcagcctcctgagtagctgggattacaggtgcatgccaccacgcccagctaatttttgtatttttagtagagatggggtttcactgtgttggtcaggctggtctcgaactcctgacctcatgatccwcttgccttggcctcccaaagtgctggaattacagacatgagccactgtgctcggcctaatttttgtatttttagtagagacagcattttacaacgttggccagactggtctcaaactcctgacctcaaatgatctgcctgcctcagcctcctgctgggataacaggtatgagccaccatgcccggccagtaatttggattttaatttctaatttgcaaatcaacttttaaaaatttaacattaaaaatactgaaatattcatgtaacacaaaattcaccmttataaagtatacacaactcagcagcgtttagtatgttcacaaagttgtaccaccatagtgtaattccaaaatattttcattacctgaaaaagaaaactcctgcccataagcagtcacccccgttttgtcctcccccagcttctgacaggttttgattttataagccccacgtgggtgagggtccatcggtgactctgatacagatggttcctagatcctaatttgaaaaatatattagtgaatcattggattttaaaatgcatgatactggaaaaagcaggtatcactggcaaccactaatctactttttgtctgtatggatttgcctatttgggatatttcayattagtggaatcctataatatgtgatttgatcttttgtgccaggcatctgttgctcaacataattctttttttttttcttttttgagacagagttttgctctgttgctcaggctggagtgcaatggcacaatctcagctcactgcaacccttcaccttccgggttcaggtgattcttctgcctcagcccggattacaggcgcgtgctaccgcacccagctaatttttttgtatttttagtagagacgaggttttgccatgttggccaggctggtctcgaactcctgacctcaagtgatctgcctgcctcagcttcccaaagtgctgggattataggcatgagccactcaacataatgttttttaggttcatccattatgtagcatggcagaataataaatattacattgtatagatacagcacagtttattcatcaattgatgaatttttgggttgtttctattttttggctattatgaataaataatgctctgygaacattcgtttacaagtttttgtgtgaatgtgtattttttttttttttttgagatggagtctcgctctgtcacacaggctggaatgcagtggcgtgatcttggctcaccgcaagctccgcctcccgggtttacgccgttctcctgcctcagcctcccgagtagctgggactgcaggtgcccgctaccacgcccagctaattttttgtttttagtagagacagggtttcaccgtgttagccaggatggtctcgatctcctcacctcgtgatccacccgcctcggcctcccaaagtgctgggattacaggcgtgagccaccgcgcccggtcagtgaatgtgtatttttgattctcttgggtatatatctaagcgtagacttgctgattcatatgataattcttacgtttaactttctgaaaaactascaaagtgttttccatagtggctgcacctttttttttttttttttttgagacagggtctcactttctcgcccagactggagtgcwgtggcgctatcttggcttaccgcaacctcygcctcccaggctcaaggcgttctcctgcttcagcatcctgagtagctgggattacaggtgcccgccactactgcccggctactttttgtatttttagtagaggcgagggtttccttatattggtcaggctggtctcgaactcctgacctcaaatgatccacccacctcggcctcccaaagtgctgggattacaggcgtrasstgctgcgcccagccgtggctgcaccatttcacatcccctccagggttcaggtttctgcacatccttatcaacacttgttgttatcttttttttttaagcgctaaatcattctggaattctttatttgaaaaacagcactttttgacacctatgccatttccttctcttatggacaacttttttcatagtttgatgtccctctctcttttttttctccatgagcactgctgtctacattttagcatttattgactataatttaattcctgcttatgcattgttttcttgtgttcttagataaatttatgtttttctctttttttgtatagattatgagctgctgcttttttttaacttaacaaaattgaggtgaaatttgcagaacataaaattagccttttttttttttttttttttttgagatggagttttgctcttgttgcccaggctggagtgcaatggcgcgatctcggctcacagcaacctccacctcccgggttcaagtgattctcctgcctcagcctctcaagtagctgggattacaagcatgtgccatgcctggctaattttgtatttttagtagagacagggtttctccatgttggtcaggctagtctcaaactcatgacctcaggtgatccgtccacctcgacctcccaaagtgctgggattacaggtgtgagccactgtgcccagccaaaattagcccttttataaaatgtataattcagtgtcatttagtgcattcataatgacatctctgtctaggtccaaaacaatttcatcacgaaagaaaackactattgagctgtcactccctcttctttcttttccatttaatggctgagtaatattctgttatatgtataaaccacattggtttattcaatcacctattgatgagcaattgggttgtttctgccttttagctgttgtgaatagtgctgctgtgaatattggtgtacaagtatttgagtacctgttatcagttattttggtatatacctaggagtaaaattactgggttctatggtaattttgtttaactttttgagcaaccacttttccacagcagctacaccattttaaaattcccaccagcaatgtttgaagggtgcagtttttctgtatctttgtcaacatttgttattatctgtttttgattatagtcatcctaatgggtgtgaagttttgttttgcatttccctaatgactaatggtgttgaacatcttttcatgtgtttgttggggttgtcttattgttgaggttgtaagagttcttttttttctttttttttttttttttttgagatggagtctcgctctgttgcccaggtggccaggctggtcttgaactcctgacctcaggtgatccgcctgccttggcctcccaaagtgctggcattataggcatgagccaccacacccggccttgtctttttgcttccttgttagtgtccttcaatacacaaaaggttttacttttggttaaggctaatttatctttttttttccttttattgctttatggtgtcatatctaaggcattgacaaatccaaagccgtgaagatttttttttattttttaatgttttttcccctaattattttatagttttggcttgtatatttaggcttttgatccattttgagtacatcttggtatggtatgaggtaggggttcatttcattttttttgcacgtgcttctccagttgacctagtaccatttgttggagagactgttctttccccattgaatagtcttggcattgttgaaaatcagttgagcaaagattttgttgttgttgttgagacagggtctcactctgtcacccaggctggagtgcaatgatgcagtcttgggtcactacagcctccacctcctgagttcaagcgattcttctgcctcatcctcccaagtagctgagactacagtcacctgccatcacgccgggctattttttttggtatttttttttagtagatacggggttttgccatgttggccaggctggtcttgaactcctgacctcaggtgatccatccacctcggcctcccaaagtgctgggaatacaggcatgagccaccatgcctggccagccaaagatttattatatgggtttatttctggattctcagttctattctgctttgattactgtagctttggagtatatttaaaatttgagaagtgtaactttaccagcattgtttttctttttcaaaattgttttggttgtttggggtcccttgtcattcaatatgaattttattttatattattttattttgagaggtagtcttactctgtcgcccaggctggagtgcagtggcgtgatctcgtttcacttgcagcctctgcctcctgggttcaagcgatccaaccacctcaggctgcaagtagctgagattacaggtgcccaccaccatgcctggctaatatttgtttttttagtagagatggggtttcaccacgttggcaagattgatctcaaactcctaacctcaggtgatctgcccrcctyggcctcccaaaatgctgggattacaggcgtgagccactgtgtgggccccrtatgaattttagatttggcttctccatttctgtaaacaagacagttgggattttgatggggattgtgttgcctctataggttgcttcaggttttattggcatcttaaccattttaagttagaatttttgatggsgaggttttttcttttagcactttatcttactgcctctggctcctatggtttcttttctcttttctttctttgaaaacaagtttattaaagtaaaggaataaaagaatggctactccataggcagagctgctgtggcccctatggtttctgatgagaagtctgttgtatctgttgttagtcttactgaggatcccttgttcatgactcttagcttctctcttgctgcttttarcatttgtctttgtctttcaacagtttgattataatttatctcaatgtgtgtatttctttgtgtttatcctgctttgagttcatcgagcttcttggatgtgtagattcatatcactttttcatgcttttatggaagaagtggggattttcacagacgataattctgccttatcagatatctgaatctctctcttagtgatctagaaagcactggacctatagttttataaccaagaaaaaattccttcctaaggactgttaggtctgcagtattttagaaagtttggattttgggtattaagttcatataagaacactcttttaagccaagtgtggtggcctgtgcctgtagtcccttttacttgggagacctggtggcaaggctgcttgagcccaggaggttgagggctgtagttcactgtgattgtgctgtgaatagctgctgcactccagcctaagcaacatagtgagacctggtctcttaagaacaaaaaacaccccacatattaactacaaattatgaagtggtttaaacttcatatttatattttgtcattaggtagagggtttgagctatatggtagaaacattgtagtttagctattttattttattttatttttgaggcagagtttcgctctcgttgcccaggctggattgcaatggcgtgatcctggctgactgcaacttctgcctcctgagttcaagtgattctactgtctcagcttcccgagtagctgggattacaggcatgcgccaccacgcctggctaattttgtatttttagtagagacaaggtttctccatgttagtcagtctggtctcaacctcaggtgatctgcccgcctcaccctcccaaagtgctgggattacaggcatgagccactgggcccggcgtagtttagctgttttaaataccataagattaacatttctaaggacactcttagaaatattttatttaaataagtgaagcaaatatataaggaaaccttctgtaaatctaaaattatttcaaaataaaaagtaaaatattgagacatatatgtttactatattaatatcaaaataaagaattgagaggtctgccttacacaatgaaaaattaaaacttagaagttgaataagggatcagctttggttaatgtggtatgaatgaacattattaactcctcaaccccaactgatgctgattattagggaagagctgaaaatacaacaaaaccttttccatgaaaggccacatttcaaaatataaattcaaaacactaaaaatcccaatacagtgcagtttggaagaaactaaaactaaaagatgacactgagaccaggcacacaaatctttagctcctaaatataatacaggttattgaatcagctttgggagtttgtggagaaaaaaatctgaaggccttgtagtgccagtggagcccgattttcagarcaagctagctgtgatttttgccactttagaactcttgtagctactcgacttyctgggaagaacccagacatgggatgtttaaatcaccaggtgggggaaaaagcactgatagaaccaattgttgaagaagccagtaccatttatagtagtgaatctagatgagaggtaaaacattgggagcccacagatgtgtttcatttagtctgtgtgtgttgacacatacagtattaaaaataaatgaattagttgccaatgtttaaaaattggtagatttagttgaaaggcccagatttctggttttgccttaaaaaaatcagaaaatctgataacccttaacccatattcccagtggatttgaataatgcctgctttaggtgggtcagttaatatctagttagccacagctcctattgctcccagttgccttccctggttgccagttatcatcatatatgtgctgtctttctttatagtgtaaaataagcaatgaaatatttcctacttctacatctgcatcaaaagtgggaaagttgaagactactgggttataattcatccctgttacttgttacctaattatatctgggcaagttacataatttttctaaaactcagctaactcatatataaagtgagaattaaatagtaaccatctcatagagttgttagacttaaatgaggtaaatcacttggaatggtagtagcaatgtagtatgttcgattaatgttagccattactactgattaaaatggctgtacattttaagaaaaatgagcattttggggcagatgtatagaaatgttcttattttcatgtacaaaatgtcagaatacaatctgatggcattaaaaaaatcactttactgaagtatggttgacattctgatgtcattttgacsaaagtctggattgattttattcattgcatgtgtgcgcagttgagtttgtaacttctgtattagtttgctagggctgccataacaaaatgtcacagactgggtagcttaaaaagcagaagtttattttctcacagttctggaggctagaagtccaagatcaaagtgtcagcaggtttggtttcttttgaggcctttttccttggctcgtagatggctgycttcttgctgtgtccgtggtgtctctgtgtctaaatttcctcttcttgtaagaatgtcagtcagtttggattatgggcccagcaccccartagccttgttttttttagatggagtctcgctctgtcrccaggctggagtgcagaggcrcgatctcggctcactgtaacctctgcctccctggttcaagcgattctcctgcctcagcctcccaagtagctgggactataggcacgtgccaccacacccagctaatttttgtwtttttagtagagacggggttgggttttcaccatgttggccaggatggtctcaatctcttgacctcgtgatccacccgccttggcctcctgaagtgctgggattacaggtatgagccaccgtgcccggctggacttgttttaacttaatcgcctctttaaaggccctgtctgcaaatatagtcacattccgaggtactgggggttagggcttcaacatataaattttgggaagacacaattaagtctgttacaacctgtcctaaaaaggcagatcaaaaacatatgttacggaatttattagagataagagattgaaggtgagtgctaagagagccaaaagcctgatcatagatgattgattaagagcacttggagcagatgaggagagaaacgataatcctaacagataaaagacaaaagttccccagagctgaagtacgacatcttcaggtctcaattgctgcacataaatattgagagaagagacataccctggttaaatttctgaaattaaaagaatactacaagcttctaaattgaaataggagggaggaaaaaaaaaagctttcttaaacgggaaagagaatcagactggcattagattccaatctgtcacagtaaaygttactgcatggagaaatgtttaatagagttcttagggaaattgtgattataaaattctgtattcattcatactataaccattttctctttttttctttttgggtggtgatatatattttaattatttaaaattttgctcattccattctatagaataagatttacatttaagcaaaattaattaaaatctaagcagagagatcaagttaagcacaggctccaggaagtcctgctgggatctcaggaatagmgacaacatgttaaaagttttagtttgaatgtctggaatttgtttgtttgtttgtttgttttggtgcattctagagtctccaagagtcagtcaccatgagtacccgtgaggtagatgatacttattttaacagcacctaaactggggtttaggagctatattttccaagaagtgactcagtctaattctgaaatgacaaaagcagttcatatcattttattcacacttgaactccactggagtcagggatgaaatgtcatsttctattccaagaatgaagtcttcagataatgtccaggtgcttcagaactaactagtcatcataagaacacagagtccataatttctccaatgtatagttttttgtggtttctagaagcatcaaatgaatcacagtgctaccaaactccacacagaactagtcacagtgtccttcctatccatcttaacattaggctcatttttacatttcaggtatttgtacattttcatagtataatagggatatatcaggtggaagttccactcactatcagtcacaaagtagctgtaatctgtatatatgtttttacacagtcatgtgaaatttatttatatacacacatataatcccagtttgttcacttatactgctatataatggtccattataggaatatatcctgttgaaatttgtgtgttccccagtgtttgctatagctgtttttgtaaacagtggtactgcggatattcatataaatgtctcatgtttgagaatttctctaacgaatcaaggagtggaattgccagactgtagggtatatttattggatattgctattgcttctcaggatggctgtaatttacattcccatcaacagagtgaagtttatttatatctgtactttctatagtcacattttaaatttatggtacctcattgtggtttctattgcatcctcctgattactagtgagtgtgagcatcttatcatgtttcttggctctttgaggttttgttttgtgagtttttgttgatatctctgcacattattttgttaggtatttttaagaatttgatttgtgggagttatttatacattttggttaccagttacttatggatcacaaatgttttccctgaattttttctgtgaggaaaagaagttttaattttattgtggttgaattatcttttcttctgtggttttgtacattttgtatattgtttaagaagtcattctcctttattttgttttttaacagctttactgagatacactctataccataacatacccatttacaatgtgtaattcagtgttttttttagcatatttatagagtcgcacaaccatcaccttaaacttttcttttttcttttctttttaagacagggtctcactctcttgcccaggctggagtgcagtggcatgaccatggctcactgcagcctcaatcccctgggctcaagtgatccatctgtctaagcctcccgagcagctggtactacaggcatgtgcaaccttgcctggctaatttttttattttttgtaaagatgaggtttcaccatgttgcccaggatggtcttgaactccttggcctcaagtgatctgcctaccttggcctcccacattgctggggttacaggcatgtgccacctcgcctggcctttccatcacctttaaactaattttagaatataccatcattctagaaagaaacctggtatccattagtagtcactccccattcttcttcactctgtccctaaacagccacataatctactttctagctatagatttgcctattttggacatttctctttttttgagatggagtctcgccctgttgcccaggctggagtgcagtggcacagtcttggctcactacaacctccgcctcctgggttcaagcagttctgctgcctcagcctatcctgagtagctgggactacaggtgcgtgccaccttgcccgtgtaatttttgtatttttagttgagatggggtttcaccatgttggccaggttggtctcgaactcctgaccttgtgatccgcctgccttggcctcccaaagtgctgggattacaggcgtgagccaccgcgcccggccatattttggacatttcatataaacagggtcaaataatatgtggtcttttgtgactgactaactttaacttagcagaataatgtttttagattcatccatgttggagcgtgcatcggtaccttattcctttttatgactgaagtataaaataacttttataagactaaacattagtcttgatacctctagtggattaaatatccatattagggatcctgggaagatgacagcagtggtagaatagtttcctaaatatctatatgactttcccctaaaacagaacaaataggataggaaaaccaaaaacacatagaaaatgtgtacaagaaaattagttgactatgtttctctacaaacgctcaaataccagcagattgggaacaaaccattgttatccatactggaagaagcagaaggaagcagtggaacttctgatggagcggagaattgtaaataacccaaaggcaatcactggaaagctttttaaagggccgattttagaataccagctgaaatgggaatttgggaagggtattgcacacatcgataatgggtgagtgaaagggatcagttgtaaagtctgaagggactagcgctccttcatgaaactttaaaaactaaccaaagctcccttccaggcccactcctcacaagaagaaggaaccgaggatacaattgagtatcctctgaagaatacagaccaaggaaagagaaggtccagataaaagcaggggaggtaaacagggccaagatacctcagaaagcaagaaactatatttttgaatactatatgaaaacaacaagagggatttttagagtataaaggcagagtagctattcagagccaagcctctttcaaaagtcaacagtatgaaatgattgttgtcaaatgtcatgcaaatttttgaagaaaaacaagaccccttagacaaggaaatgaaagcacaccagaaagacatacttagaaaacaaacaaaaactgtgagatattaagacaaaaggcaagacagaagacactacaatgataagacatttcaaaaattaatttgcataagaaaaattaaaaaattaagtgatagtgaagtattataaataaaagaaaatggctggacatggtggctcacacctgtaatcccagcactttaggaggctgaggcaggaggattcgcttgagtccaggaatttgagaccagcctgggcaacatggggaaaccctgtctctacaaaaaatagaaaaattagctggatgtgatggtgtatgcgtgtagtcccagctactcgggagggtgaggtgggaggatcacctgagcctgggaaggttgaggctgcagtggactgtgctggtgccaccgcacaccagcctgggcaacagagtgagaccttgtcttggataaattaagtgaatgaatgaatgaaatgaaacaaaatttattttagaaatgaagacaaattagaaggaacacaagagcaagtaaacgtaacagataataccttatgagggaaagaagctgaaaaggagaaagacattaaaaataaagagatgtaaaaagaattttgtagaaattgacacgttggaaacaagtaaagaaaatccaacatatgtatattaggtgtccccaaagaagaaaactatagcaagggaacagaatgggtactaaaaattacaatacaagacaattttaatgaaataaaagtagatggggaactaaattttggaagagtacagcacatacctaagaaagtgacacggtagaccaatactgagacatagtctagaaaaattattggactttaaaggaaaaataaaaatcctcagacatacaggcagaagtcacaaagtctcttacctttataagtaaaggaaaatcagggccaggtgtggtagctcatacctgtagtcccaacacttttgggaggccraggtgggggtatcgcttgagcccaggagtttgagaccagcctgggcaatatagtgagaccctgtctacacacacacacaaacacacacacacacacacacacacacacacacaatatagtgagaccctgtctacacacgcatgcatgcacacgctgggtgtggtggtgtgagcttgtagtccaagttacttggaaggctgagaggagaatctattgagcccaggaattggaggctgcagtgagctgtgattgcaccactgcactccagcctgggcaacagagctagacagtgtctctaaaaaaaaaaaagaaaaataatcagattactgtcttttttttttaaagacaggtttgttattgttgtccaatggcgtgcaatggcgtgatctcggctcactgcaacctccgcctcccgggttcaagtgattatcctacctcagcctcctgagtagctgggattgcaggcatctgccaccacgcccggctaatttttgtatttttagtagagatggggtttcaccatgttggccaggctggtctcaaactcccgacctcaagtgatctgcccacctcggcctcccaaagtgctgggattacaggcgtgagccaccacaaccgggctggtgtacactttattatcttaaatatggaatttcattgtcgcatttctccctgatgaactactgtaccatcgatagcgagaatatnnnnnnnnnnnnnnnnnnnnnnnnnnnnnnnnnnnnnnnnnnnnnnnnnnnnnnnnnnnnnnnnnnnnnnnnnnnnnnnnnnnnnnnnnnnnnnnnnnnnnnnnnnnnnnnnnnnnnnnnnnnnnnnnnttttcccattagcccttcctggggaatctactagagaatgggtgtcagaatcagaatgactagagacacattaaagactggtgatttgtattacacgtaactaagaccaaatgagggtttgaaagaagatatgatctgtaaaggggtgggaaggagaatggagggattatatgcaaaacatttaaaaaactactttcagtaataatgttcgtggtggtagtattggtgttattattttgagaatctgtgtgtaacatgaaataaaaagcaaacaagtaattgtgttattctaattctgtcacaaactgtcattgagaaccacagctcttggtgtggaagaaagaagatagagatgactgattagaggaatgtatgtttatgttaggggtgggtgagggttgcaagtgttggtagctgaaatagagaaaaaagctaatgtttcaactcaaggagcttttttaaagaacagataaaccctcctttcaccaggagaaaaaaaaatcccaggaagaagaaattagcaatattaaaaaaaatcaattacaaagcaaaatcagcaaaatatttggccaataaaatcaatttaatagtcatttggaaagtctcataaaaaaagaacgtaaaatattagaaataagaaaaatgaacattctaagaatattatgagtagttatgcctataaatttgaaaatcagagaatttgattttttttttttatggacacattttgtcagacatataaagaactggaaatgtctatatgttgttaaaattatttcagagtacagtatcagagtacaggaatgaaatgatggaaagcaccctgttttacttaatgagaggggctaccctggatatcacaactgcagtttcgcagacatgtcttatattcctcaatttaactctccagatccattcagcatttgtgttttccatcataggggacctttctggacaacatgaatgagcccctatgtcgtctgtcttctgatttggatgtggaaatgaggagccctggcagggaattggaggaaagaggagaaaaaaagtcccggtcttgattcccccatctcatacattctgtatgtaggagccttgggctggctggctgtgtcactcttagtcctcctggtccttccttttaggcttcrgggtgatgagagctgytctcttgttactagcctgggttactgcattatccctygtgatttcctataagcctcacccacagctttgtaaatagtccttatgtaaataaaccctctttaaattaatctaatttgagtgggccatctgcttcctgcagaccctgtctgacataactgatgaaattaggacttttgcatttgtagaaaataaatttttaaagtacaarttttgactaagaaaaaaatagagtacagaatatactgtatagaaaaatamgtttattgcaaacttaagaaaaatggcaaatttagaaatttttaaaatgtataatagaggtttatatagtacttgattatttatcgcattagctgttagtattgatatttttgattatttagtaattggatattggtattgtatgtatgttaaatttcctgaatgtaagtggtgtggtggctggctcctggaatcctagctactcgggaggcagaggtggcctgagggtctcttgaggccagaagttagaggctgcagtgagctatgatcacgccattgcactccagcctgaatggtagaatgagaccccatctcttaaaaaaaaaaaaaatcctgaatgtgatcattgtattgtggttctatagaagaacggccttgttcttaggagatgcatgccacaatgtttagagtggagtatcatgatttctgtaactaactctcaaatgggacagcaaaaggaaaaaagtctttgtgtgtacatgtaaggagagagagacataaagtaaatgtgtcaaaatgttaataagtggtgaattatgttaagatatatgagtattcactgttaccgttcttgcaactttttttgtggcattgaaaatttcaaaataaaaagttggaaaatatttaaaacaacaaaaattgaaatacttattatggataaagaactttattataaactaataagaaatatataaaaggctagcatttgaataagcagatcactaaaggagaaatacagaaagccattaaagaaaaggatgcttgaccttaataataaaggaatgtaaatttaaatgagctgtcggtatccatctatcaaagtagcaaagattcaaaaaacaatgctttgggaggctgaggcgggcggatcacttgaggtcaggagtttgaaaccagcctggcgcacatggtgaaaccctgtctctactaaaaatacaaaaccgctgggcgtggtgtcacacgcctgtaatctcagctacttgggaggctgaggcaggagaactgcttgaacctgggaggtagaggttgcagagagccaagatggtgccactgcactccagcagcctgggcgacagagcaagactccatctcaaaaaaaaaaaaaaaaaaaaaaaagcaatgatgtttaatactgatggagctgtagcaaattgaacaaactggtaactcttggaagtatagcttgattccctcttctttgcagtctggcagtatctatgaatgcttaaaatctgtatgctcattaataacggcaatttaacttaaatgaactaaatctagtgaggtaataagataagtgagtaaggttatatgtataagcacattcattgcagcattgttaaaaacagcaaaaaccaaaaaccatctaaatgcttatcagttcgggtttggttttatacatagtagaatactgttttagctatttcttttttttgagaaggagtcttgctctatgcccaggctggagtgtagtggtgtgacctcggcttactgcaacctccacctcccgggttcaagcaattctcctgcctcagcctcctgagtagctgggattacaggcgcgtgccaccacacccagctaatttttgtatttttagtagagacagggttttgccatgttggccaggctggtctcgaactcctgacctcagatgatctgcccgcctcagcctcccaaagtgctgggattaacacagaagtagttaatgtattgatatggaacaatatccctgattattacattaaaaataaaagcaggttaggccaggagcagtggttcatgcctgtaatcccagcacttgggagactgaggtgggaggattgcttgagcccaggagtttgagacaagcctaggcaacatggcaaagccccacctttacaaaatacaaaaattagccaggtatagtagcgcgtgcctgtagtctcagctactgggaaggctgatgtgggaggatcaccggatcctggggaggtcaaggctgcaataagctgtgatcacaccactgcactctagcctgggtaatagagtgacacactgtaataataataataaaaatagaaggttagagaaaaagatatgcattactgtcccatttacagtaaaacaactacatattataggcatgattttatatataccaatattgtgtaggttttgaaacctggttggtggagtatcaaaacaggtgggataattatgggaaaacagggctgttattttctggttttggcttaaaaacaaatagatcatgtaataggaaataaaattatctttcatttaaaaagtctgtggccgggcatggtggcttacacctgtaatcccagcactgggaggctgaggcaggtggatcacctgaggtcgggagttcgagaccagcctaatcaacatggagaaaccccgtctctactaaaaatacaaaaaattagccaggcgtggtggcacaygcctgtaatcccagctacttgggaggttgaggcaggagaatcgcttgaacccgggaggcggaggttgcggtgagccgagatcgtgccattgcactccagcctagccaacaagagcgaractccgtctcaaaaaaaaaaaaaaatagtctctgcactaatttttcctttaaaataattctgtatgctggtttgttaatatagtttattgaattaacaaaaaatgtgttaagaaactcattttgctcttgtatatattctgttttcagagcagcggaaagagctcmgtgctagaaagcctggtggggagggacctgcttcccagaggtactggaattgtcacccggagacctctcattctgcaactggtccatgtktcacaagaagataaacggaaaacaacaggagaagaaaatggtaaatttcagatttgagataattattttacagctcttcatttttgatctattcttaaaaagatatgaattgattagataattagaaattagtgactgtagcatagttagaagtcctgtgagaagtagtatgcatctttcttaatgtaaaaaaaagagtagtttttgttttgttttgtttttgagacggaggtcttactctgtcgcccaggctggagtgcagtggtatgatcttggctcactgcaacctccacctactgggttcaagcaattctcctgcctcagcctgccaagtagctgggattacaggcgccccccaccatgcccagctaatttttgtatttttagaagagacagggtttcactgataactactgcagttacctgaatctcnnnnnnnnnnnnnnnnnnnnnnnnnnnnnnnnnnnnnnnnnnnnnnnnnnnnnnnnnnnnaggaggctgaggcagaagaatcacttgaacccaggaggcagaggttgcagtgagctgagatcacgccactgcactccagcctaggcgacagagtgagactccgtctcaaaaaaaaaaaaaaaaaaaaagaagaaaataggcattgtcctttataaccgttcttttttgattaaattgaaaatatattagggaatgctgtgtctatcagcagattttaagttgcttaccaaatatgtatcctatgttaattatacttatattaatgaggtttgaaatgttgaatgagagtaacgtatttaatcttcctatttrgttcagtatttggctcagactttcttatttatagaactctgtaacatagctctaattattaaattacttttgcagcagagtaccatatctgtttcttatctgcagagatctgttttcaatgcagttttattctacttcttattctgatttaagatgggatgatagttttgacaaaattgaacttattttaatttctgtgtctgattttttcatttactgtaggagctgttggtggtgatgacttgaattttttttttaatggggaaaaaaaacctcatgagcatctgctatgactctagaatgttagtcactgaagcaaattagtgtagttgtagatgttgcaagtaatatttttagatagactgccagtggctatgtgggagccttttaattacattaggtagcttctgggtatgttattcatcactttgcatttctctaatacttattgaagttctgaaccttgaatttaatcatgttggattaatctggggttcaccttcaaatatatagaataacacttataaaatttcatccccactgatttcatcaaatttaccaaacatctgaaactaagaccttaagacactatatgatattaggtctttctctctctctcttttttttttttttaactttccattttcttctgtcaccttgagagggcccatgatatcctgtctctcagaaactatttgaattgtgggcagtgtttccttagataaaattgtgcttgttagaaaagggtgtacatttcagctatcgtagtgtcagctctttggtatctctttgtttttatgtccactatgttttgttgatgtctcctcttagtggttggtcagtaaatctgcctacctactgtttttttccaagcttagtgctgattttgtatatatatttgcttaaaatgacaactcaactaccccaaacacaatatakattatataaatttgagtactagatttcacgtgttttattctagcatagacagttcgttagtttttcatcaaagcttctttatccttagaataaacaattctagyatatcataaatcattctaacccagagaaaattagaaaccatgaagcagataaacaatatagttagctagaagagtgtgaactacctgacagcctgataataagagaggagaaagggaagaaacataaactttcaaaaaaaaaaaaaaaaaagaaatcagttactaacattttgtgtagggattttatttagccagtgaaggcttagttacatgacaaagacctaggttaccaatagtagattcagagtagtacattctaagatgacatggagaagtataatccatcttagatgtagcttcatcaaaactggctaaagtaaaatattttagtgtttaatatgtataattcaatcatcaggacatttatttagcataggattcttcattctgtcaactgtgggataactgaggtgtcagtatgtagatttatggtcatctcagcttgccccctacttctgcccatgtaaaagaattttctgttaaatttttattaaaaacaatactaaactatgttttagagtagagtggtggttcagtttgaacagaactccacggttatctttcatatatttgtaagaaataaatcaagctttcctcagctttcctttgagacaaaatccaaaagtagcatgctgattaaaggccaaaattgtgctatatatgatacttctgaacagtgtcagtagaaatttgaaaaaaaatgtgaaaaaaaaatttattttggggagaaaagttgttgaactaaagcaaaagttttttgttttctttttaaaaaatgcaaacataggccgggcgcggtggctcacgcctgtaatcctagcactttgggaggccgaggcgggtggatcacctgaggtcaggagttcgagaccagcctggccaacatggtgaaaccccatctctactaaaaatacaaaaataagctaggtgtggtggcgggtgcctgtaatcccagctaatcgggaggctgaggcaggagaatcgcttgaacccgggaggcggaggttgtagtgagccgagatcgagccattgcactccagcctgggcaacagagcaagactccgtcttaaaaaaaaaaaaaaaatgcaaacatacatgtttcgtagaataatgcttaaaatcttggtataatttgaaattttacccccatttcattaagtaacctatttgtaaaagcaatcagttgccccccaaaaagcagtaaaattacacattagaattaaaggaaaaagataggattaatttttctgcatagggtgctgtgatacacgtagtagtctccctttggactgagtccacgaaggtcaagagttaactttctgcagtgttctattaaatccaatgtatgtttcaaataaaatacccttatatagtccagtcttagctaatggggcaaatacttgcatatacttaccaacttttaaggttttgaaagatgtatttagtatattttgtagatttttaaaaatcaggcaatttatcttttcctgtagtaggttatcagatatctcaggcaaagtttttttttttttttttttttttaaggcagagtcttgctctgttgcccaggctggtgtgcagtggcacaatgatctcagctcactgaaacctcctgggttcaagcaattctcctgcctcagcctcctgagtagctgggattacaggcgtgtgccactacgcccagctaatttttgtatttttagtagagacggggttttgccatgttggccaggctggtcttgaactcctgacctcaggtgatccgtctgcctcggcttctcaaagtgctgagattagaagtgtgagccccacacttggcccaaatttttgaatagtgaattaattgtgcttcatttgtgtcagaattagaaataatggtcacataacttttttattaattttaaaaatttaatttttattttttagactagtcaagtgcagtagtaaggcgggaaagagtagaacaaggagttccatctgtaactgactgaacagtcaattgagataactaccttcagacaagccagatataactaattatattggaaaggttgtttcctaaaaatgttaaaaataagttatggcaagcaatatgctttgtttctatgacttaaaaatattatatacatccctctaattctagttgtattttgcactgcgcagtgggattcttaatttttcttcttagccactaactttactttcgtcagtaaattttgaataattgaatgctatgtgcatttgaaatgtgatcaggtttctgcacatttgaatttttaataaggtttaaaattttagggataagcactaaacttattctgtgctgtttctctttaactacagaccctgctacatggaaaaactcaagacacctttctaaaggtttcctttatccatttgcttttgaccctttttttctcttatgcctgcatgtgtgcttatgtactattacaggctgtgtgtatttttttttcttccatttttatttgcccatccacattgattgcaggttttagtggttcttgttattttttttggcattgcatcaaaatgcaagcttttttggtggtgaatgtaatttattttatttttatttttgaagacatgcttgtgaagccaagcctttttaaatataataagataaattagaaacagctctttggtatgtagtacttgcattttgtgagttctgttcacctagattactccagtcctccaatgagacttcttggaagaaggtactaagctacaagtaggtgagcattttatctgcaaaaaggatccggttttatttacctttattccaccaaaggaccgactcactcttctgtttgtctgaatatcttatgatcatttttatttagacctcaggaggctgatatgcattattcaatacacttattaagatattttaaccttctctaaatttgacaaaagcaaaacagctgtgtttggaggagataaagttagattatctttccacaattaaacagttctagtttttctgggaaaaacagactatatcttgctctccaagttttagactacttcacacagtgcaacagtgaatctattttccttctttcagcaagtacaagaggaacagacctatgactggaaactaatggagagtggcaactccttacgctgcatataccagggttcttgtttttccttttcttccattttatttctttcctgcctccagttccaagggaaaacagtcttgaccctgggggaaaatcaccttgaaagtgtgtgtaaattacaaagcagctagctctataataatgagagagctctttaaaggaacagcaagttgtggctctacaggtaaccaacaggaaaccaaatttttaaaaagaactgaagaattagctgtttcattgacacattgtaaaatttttccttgagtcatatgtgtacatctgttacatatgttttttgcactactcagtgggattcttaatttttcttcttagctactaactttattttcgtcagaaaactgcttttatatgtaagattttcaaaactaaagaatattccttttactgtaatataactacacaaaaaaatatgaagagaaataaacaattttatttgcaaaatctagatttcaactagtgggaagacctgtgagcagctctgcctgaagttggtcatgtttttgaaatacaccatacaatttttaaaatataatttagcagaaaatacaattttagaaaaatataatttagcagaccttaaaatacttgttaacttgtacttaatggcaaaattaaatacaagttaagaagtgttttattatgttgcctttttgaattcctaaagataaaaagtagtttccatagtttccaataaatgagtttttcttttttccaggrgtggaagcagaagaatggggtaaatttcttcacaccaaaaataaggtaatcacacatgcatataaygaagaaataatgttgaaaaaaatatattgtatgaatacttgataatttagtttctaatcattggcaattacgttattttaaagtaactataactattccttataaaataaatcttagtaacatttctaaccacaattgtttattggaaaacacttgaaattgaggccgattttctctgtgatttggtgattcttaattgttgtgggatcaggaagctttgaaaagttcgtaatggccaggcatagtggctaatgcaagtaatcccagtacttagggaggctaaagtgggtgggtcacttgagcccaggagttcgagtccagcctaggcaatatagggggaccctgtctctataaaaactaaaaaaaattagccccgcktggtggcatgcacctgtagtcctagctacttggaaggctgagtcgggaggatggcttgaggatgtgaggttgaggctgcagtgagccgtgattgtgccactgtactccagtctgggtgacagagtcagaccctctctcaaagaaaaaaaaaaagccaaacagaaaaaaactcataaaaaaactataaatccttagctcagaaaatatgtatacattagaattttatttattttctgaagcaaatacatagacatccttgaagtatatggactccccctccagcttaagaacttttgatcttattttgaatattatgcttttttatttcaaaaatttttagctttacacggattttgatgaaattcgacaagaaattgaaaatgaaacagaaagaatttcaggaaataataaggtaggcatctttttagagctagaaggcataagcatcagtaaatatataattgaggtattctgtacataatatgtgaagggcattgtaaattcctactcttgatcttagccaaaaggccgagaagcgatggacattgtaaattcataatggactttgaaacaaatggagtattttcacagatatatagaactttgcttaaaatcccttttctttcttaaagctttcatataaatcaaatattttatttagatgtttattgttgttcctgtcatgtacatgccacattattatataattctacttagtattgctacaataagttatctttttctgatggattgattgtactctaactcaggaagcattgtttcacttatatatatatcttttgaggagttcttttcttacctgtgtatggctagatttgcttatgaaagcaaaaagagacaaattgggaatttttttttcttttttttagtgaaaatgaaaataatacattagcaactggttttcttattttctgagattgtgagaatgtgaagtaagttatgtatctaagatactgttaatcttgacactaggtactatcactgccttgcctgaatcctgctgtcttctgtcttctttattcctattatttttctctttatatttcaagagatatatattatctcttgagatttttatttcccttcctttttgttcttagctccattcttatattatccagaggcacatttaatcccacaagtgggccctagcctagtactaatattcaacaaatattgaatccttgtatctgccagttactatgctaaaagattatttcctgacagaaaggcatttttagagtcatgttaacctttatgactgttcaggatatttgttgctgttacagtgactgactgagctttgttcattgttgaactctaggctggttacctttgagctactgctactgttgccatactttcctgaatttctagtaaccatgttgtatagaacgggttgaaaaagtggccagaaactagattagcttatcgtcattcctctaattatatcagggatatttttggcttttggaatgttattgatcataacatcagtctgaattctctctcctacagtccccatttacttactgaactcagcaattggtggtaattttacacagtaccagaatttagagtgttgtgatgattcagaaatgtttttagttacactaaactgaatgtcattgaagattgagtctatacctacaagatgtttaatttatgttgaggatataatttacttacctagcagcttttcatccacagtgtctaaaagatgaaaagtcccccaaccccaaatctatgaaacatctcttctttcccaaatcacgtatgtaatgaagtaaatgatattttgatcttatataatttttatgtcaaaatatgtaaatgactgcatatgcctaacatatagccctgaaggatttaaaatgtctgtgagtttggagttgcaaaggtactgggcagagctttgtattggactgataggggaatgccatggcaataaagatcctgagaaatatacaacctaagtaggtatgccagatagtgacatttgttggctttggaacactggagtatttataatggaaaaatagcacagagtaatctaaaatagcaaatataattgtatagggaatgtggagtaaaggatattaaaaacttgctgggaaattagaattttcagtgggctaatgagggaaaacataaggtagttaaacaggtgatgagaggatatattaaaggctaaagaagggcatgtacaaagacagggtataaacatctcataagtgtctttttacatgtagttgattcaatcctaatacttgtagagggccagtggtgaagaggagggagcctacgcagtattcttagtctgcaggagagaaaatacacgttacctctcactatccaaattcttactagagattaaagagttagataaacttcttgagaaatctcttactgtacacattcttgccacttgatattcaaagatcaggaaccaggctgatttggacaacttgttatctacgccttactctctgaactcggaacctcataaatttggatagtgaggaatacattattcttttattcagcactaaatctattaaacatatttaaggaatggcatatgccagcctgggcaacattgtaatacccggtctctacaaaatataaacaagaaattatctggacatggtggtgcacaccttgtagtcccagctactcaggaggctaaggcaagagattgcttgagcccaggattttgaggctgcagtgagccatgattgcaccactgcactccagcctgtgtgacagagtgagaccttgtctcaaaaaaaaaaaaaaaagaaagcaaaggaaaaatttatgtttataatcaagagaaaagaatgtaaaataatacatggtatataatacatgtacatataacatgatacagggatagaagtaggattataacctgttaatatggctggctrcctgacttcccatgtgtttcatcaggttttgattgttaaaaaaaagttttaggaatcatgatttaattcatttttaaaagcattaatgtctatgtacttgaaatgaagtttattacttcatagttcattgaaattttaatatattttaaaatttatttttagggagtaagccctgaaccaattcatcttaagattttttcacccaacgttgtcaatttgacacttgtggatttgccaggaatgaccaaggtaaggaaggaatagttgtagatttggtcaggttgttttcacttcgttgacatcccatatgagaataatcagcttctttttgcaatcactttgatctgttagcagcatttgataacgttgagccctcctttctccttgaaacactttctttacttggcttccaggataccacactctacaggtttatctccagtctcactggccactccttttcagtctcttttgctgtttcttctcatctccccaatgtctaaacagtaagtgccccagagctcagtttatggaactctcgttttctctaggtacactttccctttgatgatttcatcagattttatggctttaactacgtaaggctctgtatattgacggcattcaaatatctccagacttgtatatctagttgctattcgacatatacacttaaatgtctaatagacatttcaaactctaataccgaattcctgacctgttcctcaactagatttggtatttctatagtcttcccccatcgcaataaatggcaactcatgccatttattggcaactcataaaaaagctgagttgatttttaattgttagttccttggccatctctgtttggtgcagtggcttatcctgtaatcccagcactttgggagatcaaggtgggaggaattctttgagaccaggagtttgagaccagcctgggcaacatagggagaccacgtctctacaaaaaatacaaaaattagtcgggcatggtggtgcacacatgtagtcccagctgaggcaagaggattgcttgagcctaggaatttgaggctacggtgagctatgattgcatcactgcactccaacctggccaacagagtgagaccctgtctctaaataaataaataaatggcaactccattctaccaattgcttagccagagtttgtagtcatccttgacactaatttatcccacattccacttcctgccagcaaatcctcttggctcttcctacctttacagtatatccagaactcaatcgtgttttataaattcatatttactgtcctgatctagccactatcatgctacctggattactgcacaataatcaataataggtcgtccttgtgatctcatcttagtagacagtgatacgattaaagtgaaaattcgattgtgtcatttcttggctcaaaacttctccagttccttgtcattccttgacttaaaacctctcccatttcactaaaagcccaagttattacagaggtctaaaatatctacttgttacgtccctattcttctcctaactcctgttgcttcagcctcctgcccttattgttcactctctttggaatttcttcccccagatgtctgtatgttattgctcccttattggcttaatttctgctcattctcttaagtgtcagttgtctcagtgaagtttccctgattactctatttaaaaacataatccaatttaaaacattaaaatcataatcctaatggccaggtgcagagtggcttatgcttgtagttctagcactttgggaggctgaggcaggaggatcatttgagcccaggagtttgaagatacagtgagctatgatcgcaccactgcactccagcctatgtgatagagtgagaccctgtctcaaaaaaaaaaaaaaaaaaaaaaaaaaaaagaaaaaaatcatctctaatcattccctagcctgctgttctgccttattttcccacagcccttaccaccatctgtatactatatatatgtttttgtttattatatgcgtgttattactaaaacataagttctacgaaggcagaaagtttggtctttttaaaattcactactgtaacataatctgacatgacctgaaatcacgttcagaaaagtgcctaaaatagagtaggctgccagtaaacacttggtaattgaatgaatgagtgaatgaatttgtatctagccaatcaacattgaccagttyttaacatgggactgtattaaatcaacttttgatatttgcaagagttacactttgagacttgacacattaccagattcataaataccattgtagtatattagtaatgtctttatttttattttaactatttttaaatggatatacctatattctatcgattaaatgtgggtaaaaaagctgagttgatttttaattattagttccttgctcatctctgtttggtttaggtgcctgtaggtgatcaacctaaggatattgagcttcaaatcagagagctcattcttcggttcatcagtaatcctaattccattatcctcgctgtcactgctgctaatacagatatggcaacatcagaggcacttaaaatttcaagagaggtagatccagatggtaaggacagatgttaatttaatgagatgcttattttacaatggtaaatctacccttgagaaaggaatttttctctttaaaaacagtatctctggttttgaatacaaatttaaaagataatgctttcctatttttgtttataaaaatagaaattctgatggaaaataaggttattaagttgctatacagactaggcgaaaatattttacaactttatttgtaatggttacctaataatttaaaaataatacggtggctttgcaaaaaggatttcttgttttgtgacctaggtatttgaatagttgacttttaagaataaataacatagccaggtgtggtcacatgtgcctgccgtcccagctactcagaaggctgagatgggagcattgcgtgaggccaggagttcaaagtcagcccgggcaacatagactctgtctgttaaaaaaaaccaaaacacagtaggtaatcattgtagattattatggtacagtagagaattatggtatctacattctgcagaggtagataatatttagacatgctcaaggcacaggggatttttagaaatgaaggtaaaatcctttcatgaagcattttagccccaaggattagttcatactgtgggtcactgatgcttgactaatgatgtagtgcacatctcatagtatatataaaatgctagcttgtaagagagtggttactattgttgctaacaaatgtatgcatggcctcatatagaaaccatttttttcaccttactattcagagggtctgaaggttgtgtcatgtttttctttccctgctttgaagaataatttcaaataaaaatttgataggaaatagtgctaagactgccaatctgccaataaaaattcccataagcagggtcactttaacaattttttttttttttttttttgagatggagtcttgctctatctcccaggctggagtgcagtggcgcgatctcggttcactgcaagctctgcctcccgggttcacgccattctcctgcctcagcctcctgagtagctgggactacaggcgcctgccaccacgcctggctaattttttgtatttttagtagagacggggtttcaccgtgttagccaggatggtctcgatctcctgacctcgtgatccgcccgcctcggcctcccagagtgctgggattacaggtgtgagccaccgtgcttggccccaatattttatatttcaagtttttaagaaactcttttttaccacttgagtaaataatgttcatttcagttaaattaaaagataaactatatcaaagagtttatttacattttatttttattatttaaagtagactgggctcagtggctcatgcccgtaataccaagcactttgggaggccaaggtgggtggatcacttgagctcaggagttcgagaccagcctgggcagcaaagtgagagccccatctctattaaaaaaaaaaaaccacaaaaaacaattagctgggtatggtggcactgggctgtggtcctagctacttgggatgctgaggtgggaggatggcttgagcccgggaggcagaggttgcagtgagccgagatcatgccattgcactcttgcctgggctcagagccagaccttcgtaaaaaacaaacaaaaacctgttaagcattttatatgtataaactctattttaaactgacccttgagccatagatattgtcatatttttaatctaatcttttttttttttttttggatgtagggtctcactctgttgcccaggcctggagtgcagtggcacaatcatgcctcactgcaaacttgcagtcctgggctcaagtgatcttcccacctcagtctcccaaagtgttgggattgcaagagtgagccactgcacctggtttgattactaatcataatctagtaatacatcataaggaaataatccagcccagtattatttatagtataaaaaattagaaacaacttaatatggccagcagttggaaagattaagtaaattataataataaaatatgaaataattaaaaaggatgattttgtagatttgtagcagtacagaaaaatgcttgtaggctgggcatggtggctcacacttgtaatcccagcactttgggaggctgaggtgagcggatcgcttgagaccagaagttccagagcagcctgaccaacatggtgaaaccccatctctctaaaaatacaaaaattagccaggcatggtggtgcatgcctgtagtcccagctactggggaggctgagacatgagaatcacttgaactgtggaggcgaaggttacaatgagccgagattgtgccactgcatttcagcctggacaacagagtaggacagtctcaaaaaaaaagaaaaatgcttgtaactgaaaaataccataggtaaaattgtacactatgcagagcagttggaactctcacacgttgctggtgggagtggtgtagtcattttgggaaacagtctggcagtttcttataaagttaaattagcagtcccgttcctaggtgtttaaccatgttaagtgagaaccagtgttcatataaaaaactatatgcaaatgtctacagcagctttattcataattttcaaaaactagaaacaactcacatattcctcagatggggagtgaaactaaagtatggtacattccatacaatgggacactactctgcaataaaaaggaatggactattaatatacaagaacacggatgaatctcaaatgcattatgctaaatgaaagaagccagactcaaaaggttatgtactatctgatttcgtttatataacactctagaaaaggcaaaactaggaatggaaaactggtttgattggttagcataagaaaatttggtgggggggggtggcaatgtcttgagttggttgtgacatatctcttggcatttgtcaaaactcttagaactgtacaccaaaaaagagtaaatatttttattttttgtttattgagacagggtctcattctgttgcccagggtggagtgcagtggtgcaatcacggctcactgcagccttgacctgggctcaggtgattctcccacctcagcctcacctgtagctaggactaccacaccctgctacgttttctattttttgtagagacagagtttcaccactttgcccagactggtctcgaactcctgggctcaagcaatctgtctgccttggccttccaaagtgttaggattacaggcatgggccatatcacctggatgtaaattttatacagatttttgaaatgcttacaaaatagccctaagagtcaacaaaaaattacatgtgaaaaaaatctattttatatatatactatatatagagtatatatacactatatatagtatatatatatatatatatatagtaactgaaaataccataggtatttcactacccatctgagaaatatgtgagttgtttctagtttttgaaaattatgaataaagctgctgtagatatttgcatatagttttttatatgaacactggttctcacttaacatggttaaacacctaggaatgggactgctaatttaactttataagaaactgccagactgtttcccaaaatgactacaccactcccaccagcaacgtgtgagagttccaactgctctgcatagtgtacaattttacctatggtatttttcagttacaaatatatatacataggtatatatatatattttatatatatattttatatatttatatatattttatatatatacctatgtatatatatttgtaactgaaatatatatactataaaatatatatagtatatactatatatatttatatatactataaaatatatagtatatattatatatattttatatatagtatatatagtatatatatactatatattatatatacactatatattttatatatactatatattatatatacactatatattttatatatactatatattatatatagtatatataatatatatactatatataatatatagtatatataatatataatatatattttaaatatatactatatatattttaaatatatactatatatattttaaatatatagtatatatattatatatatatagtatatatatatattttagacggagtcctgctctgcatagtgtacaattttacctatggcatttttcagttacaaatatatatacctaggtagatatatatataaaaaatacatatacctaggtagatatatatataaaaaatacatatacctaggtagatatatatataaaaaatacatatacctaggtagatatatatataaaaaatacatatacctaggtagatatatatataaaaaatacatatacctaggtagatatatatataaaaaatatatatacctaggtagatatatatatttgtaactgaaatatatatactataaaatatatatagtatatactatatatattttataaatatactatatatagtatatactatatatatttatatatactatatatagtatatatataaaatatagtatatattttatatatatataaaatatagtatatatagtatatatattatatatagtatatatagtatgtatagtatatataatatatatagtatatatattataaatatatactatacatactatatatactatacatattttatatatatactatacatattttatatatatactatatatattttatatataatatagtatatatattttatatgtatagtatatatatatattttagatggagtcctgctctgtcacccaggccgaagtgcaatggcacgatctcagctcactgcaacctctgcctctcgggttcaagcaattctcctgcttcagcctcccgagcagctgggattacaggcgtctgccactrtgcctggctaatttttgtatttttagtagagatggggttttaccatgttagtcaggctggtctcaaactcctgatctcaggtgatccacccgccttggccttccaaactgctagaattacaggtgtgagccaccgtgcccggcaaaaatgttttaaaaaattatacacaatgtttaacattatttttaaaaaagcactggtaagtaaggcattaccaaaatgatgacagaggtaatactaagtgggattrtagatgagggttttcctttattaacactaaatagttgtatttaatggatcattttctttcttttctttgcccttttttctttttgcatttaccaggtcgcagaaccctagctgtaatcactaaacttgatctcatggatgcgggtactgatgccatggatgtattgatgggaagggttattccagtcaaacttggaataattggagtagttaacaggttagcagttagaatgggataagaattgggataagcattcttagaatgggataagcattctcacttcagagcaagtctgaatttctaaaatctgtttgaaatgtgatgctgtactatattttttctcycttttattatgatcttggtattgctaaagaatccgttgccctaaagggagaaaagagagagaatttttttttttttttgaaatagggtctctctctgttgcctaggctggaatgcagtggcgtgattgtggctcattgtagcatcaacctctgggctcaagtgatcctttcacttcagcctttcaagtagctgagactataggtgtgtatcaccacacctggctaattttaaatttttttgtagtgacaaggtcttgccatgttgcccaggcttgtctcgacttcctgggctcaagcaatcctccaaccttggtttcccaggtgctgggattacaggcatgagccactgtgcctgccccatagacatttttactggaaaatgtttctaaagtaagcaataccacaaaatggaagaaatgttgtaatagccaggctttaagaattcttgcctatcatgttaagctatgtatgaggaggtactgggtaagggaaaaattatctaatgtgcacccaatcgagaaagagtttaaggtggcaggattttaatagattggttttaatccctggcattagtgatgcttctgtgtaattgccaggatgtgacttggagaaattktattaaaggtatcctaatttataaatagttggtattaaaaactgggaaaaggaaactagtattgagtgtctaattaaaggtgacaagattttaatagattggtttaatccctagcattagtgattctgtgtaattgccaggatgtgacttggagaaattttattaaaggtatcctaattataaatagttggtattaaaaatcgggaaaaggaaattattattgagtgtctaattacgttttagacactctactgtgagcaatttgcaaatggtatctcttggaatcctcacagcatcccctgaggtaggtgttgatgtctattttataatcagaaacctcaggttatacatttaaccaaaagtcacgtgggtagtgaaagagctggattcggatgaatatctcttttagtccaaagccttcatatggtaggaaacactgaaattatcatgaaatctgagttatagtcctagttcttacataaactagatacaacgtaggtttaaatgacacctaatgtctttgggtctcaagcctttagaaaatgaaaatgtttttactgcctgatacataagatccattccagttgtctgcttctattttaatgtccttccattccaaccctactgtcattctcccatccccactgtcattctcccatccccactcccaattccagctgtctcctttttcaggtaaggaggtggcctaacactgttcgttgtttgtagatgattgttcttcaagttaacttaattatttttgggagaaattagttccctgtccatggataaaatatacagttgactaagatactcttatatttttatacctgtctatacctgttacttattgtttttgtctatagttaatggtaataatgaggcctactctatttaggcactagttacttacaattcacttagttcaagtcttggctatgccagttastgtgtgacctggggtaagttagtttttgtgagcctcagttccttgctatacaatggggtaataatacctgccacataaaattattgtgagaattaaataaaacagtccctgtcaggtattagagaacaatgcctggtgctgtcatcatctaaggtaggaagaggacaacagttaagctgaatagtttcgttattttttcaacctcaggagccagctagatattaacaacaagaagagtgtaactgattcaatccgtgatgagtatgcttttcttcaaaagaaatatccatctctggccaatagaaatggaacaaagtatcttgctaggactctaaacaggtaatttttttaccttttggaaatgagatgtgtttgtttttaccaattggtgtctgagagggttcattttcagttccttacattttcatactgttcctaacagcttcacttatggtttcttatatagtaggttcctgaagagtagatgtctctgtttttattggggtggttgacattacatcatcaygtagtctagaatgaatgtacaagtgattttaaaatgttttaattacgaaaattttgacagttaatttagttttgtggctagaactagagatgacttcatttccactttgcatttcaggaactgattaaaatttgtaattttcacattatctattcttaccttagaatgtgttttatttaccaggaaagggagatggaaaaacaaagaaatagaatgtcttttatttctattcactgtagaaataactatacgttggattctgaatacccactgatgtgtggggactagaagccctttctagatgatttataaatgactgaagtggaagccattttctcttacttttatcttattccctaaagactgatagacttggatcttaataaggttgattttcactttgctgggtaccaattgtaaatgacaagtcaatgaaaccaaaattatataggaagaattgattgggtggcttattttctctgtggtaattgcagtaatatgaaaataatttgcattttttccttgcttttattatttaggaaaaaccaatcaaaattgtttttttccttttcacacacagttaatcagtatagcacagaatgcttttgagagcagatatatggggagttttccccatacatcaagcaaggaattctccaggggattctagctgaatgtcctttaattcaatgctaacactgtttacctggagatagtgtcagckcccacaggttgagggttcagtcccacaagactgcccccaagtcagatgccagttgtaagcacaggttgtagcctgtgtttctgactgacaggctataagtcagggtacccatgatccccttttcatgtttgatgaatttgttagagtggctcacagaggtcagggaaacactacttagcatatacccacttactgtaaagcatattacaaaggatatagataaatagccagatgaagagatgcacagggctgggcatgtgggaaggaatgtggagcttccgtgccctctctgggcacaccacactccaggaaccttcatgtgttcaactctctgaagactccatgaactgtgtccttttgagtttttatggaagcttcattggccattggtgatcagctcaatgtttggccyctctcctctcttctgaggctgttctggtgaccagctcccatcctgaagctatctagggacccccagccaccagtcatctcattagcatgcagagacactctaaacacccttaatgctcttggagagtccaaggattttaggagctgactgccaggaaatgaagacaaagaccaaatatatatttcacagtatcacatttgccaggacaaattatttgataggttttccccattgtaaaaatttgacttgtttagggctttagaatacacaattttacttttaaatccttcctttctaaccttttttaggttactgatgcatcacatcagagattgtttaccagagttgaaaacragaataaatgttctagctgctcagtatcagtctcttctaaatagctacggtgaacccgtggatgataaaagtgctactttactccaacttattaccaaatttgccacagaatattgtaacactattgaaggaactgcaaaatatattgaaacttcggagctgtaagtaagaaatttttctgtagatttggttacctagattgctaggtcacttttccttttgtgaagatgacttcagctcagattatctgattaagatttattttctataaaacaaaaatataactttgtagagataataggatgatgtctggttgtgtgaaaatatgctttgtaaatgatataaagcaaagtaaaattgtcacatatttttaaatattttaatattttataagtatttacttatttttataagtatttaataagtattaaatattttaataagtatttaaaaataatttagcttttaaagtgtttgtttctttagtacacacagtataattgctcacaaaaattagaaaatgcagataagtaaaaataaaacataaaaacaaaattacatgttggtgtgcacctgtagtcccagctactcagaaggctgaggtaggagaattccttgagctcaggagttcaagtccagcctgggcaacatattgaaattccatccttttttttttttaattgaatccaaattttattaaggatttcaagttacatacttcagatttctagaatggaatggaataattttggaactggaaaaatggcataaacactgatatcccttgaaacttcaattttataaagaaaattcttctgcaaaccacatccccattatataacaagaccaggtattatcgacaccttcactttggcaataactatttcctaaaagaatgaaaaagattattttgctacctcagttcgttaaaaatgggattctggccaggcacagtggctcatgcctgtaatcccagcactttgggaggctgaggcgggtgaatcacctgacatcagttcaagaccagcctggctaacatggtgaaaccccatctctactaaaaatacaaaaactagccgggcgtggtggtgggcagctgtaatcccagctacttgggaggctgaggcaggagaattgcttgaacccgtgaggcggaggttgtggtgagccgagatggtgccactgcactccagcctgggcaacagagcaagactctgtctcaaaaaaaaaaaaaaaaaaaaacagggattctatctttaaagttcagaaaaagctgcatttagatgaactacggctaccaaaacaaacaaaaaaacagagtgtctaatcaaagcaaaggaaatgattttgaaaatagaacaaagctattataattggttaaggatttccagtagtaagttaaaatctcaggagaggaatggatagcattacaaacaatgtgttcacattccaagacctgaacactaacttctcaaaaaggaagttttcatcacctctaaaaatgaattcaatgtaattttgttaagagcaggaaatctagaccttcctctaatgacaatccaatagtccaccctcgccatcgtcaaaagaaagttgcctcaaaattaacagtaattagcctgaggtattgtaaatgtggcactacagtctgaaatttaatggcatcttttgtcaaaaatagtcttatctctactttaatctcatgactacaatactatgtgctatccctgtagtatttactactatgcagtcatacagaaaaaaattgttggaccttgtgaaatagtgcatccatctacttctataaaaataggagccacattggccaggcgcagtggctcacgcctgtaatcccagcactttgggaggctgaggcaggcagattacgaggtcgagagatcaagaccatcctggccaatatggtgaaaccccatctctactaaaaatacaaaaattagctgggcgtggtggcacgtgcctgtaatcccagctacttaggaggctgaggcaggagaatcgcttgaacccaggtggtggaggttgcagtgagctgagatcgcaccactgcactccagcctgggcaacagagagagactctatctccaaaaaaaaaaaaaaaaaatatataatatatatatatatatataaattatattaattaaatataaattaaatatttaatatatatataaaaaataataatatatataataatatatatagaagccacacaaagatcactaactgatagtttagtttgataactgttttccagtttagttgtcaaagcatggtgtgaacaaaatgctgagtgtcaacactggcattacaaataggcccaaaatgtgagcttttaatgagaatgagaaacattttatgagatttaactgaatatgccttaacacatccatgaggtagttaagtaaacagtactacacattttaatacatagtaaacagaagcatgggtaagtgacatactcatacttcaagcaataagaattagaagaaaccacacagaagcttggggcattctctctagctctaccccaaagaaaatgaactttaatttttttttttaaagcatcgtatcactgaagattttcttcttcttcttctttttttttacacttgcttattagtatagtatctctttccaaagctggtacccttttcaataatgtggtaaaaactgagtataacccttaattcaagctaggcctctccttctacctgaattggtacaaaattaagacatcttgtaagaactaaaattgtatttgaaatttttattttaggctacaaaaacaagcaaacaaacaacaaataacttgaaaacaggtcttgtcaaatgatgtaagttcatcctttccagggaagcagaaggtagaccctaccacaaagaaaagatgcttagttaatggaggttaaatttaaaagtacagtgaaattcaggctaacttctgaaaaatccygttttattcacctcactgtggtaccagtaactatactgagtcaggttactttacagttaactatgtcacctataacacaataatccattaacaatctaatacagttattgggtgtggtcatactggaagttcttaaattcttaaccatatagttgtcttgccaatttttttttctttcagatgagtcttgctcagccacccaggttggagtgcagtggcacgatctcagctcactgcaaccaccgtctcccgggttcaagtgattctcccatctcagcctcctgagtagctgggattacaggcacccgccatcatgcctggctaatttttgtgttttagtagagacggggtttcaccatgttggtcaggctggtgttgaactcctgacctcaggtgatctgcctgcctcagcctcccaaagtgctaggattgcaggcgtgagccaccgcgactggcatgccggttttttttttttttttaaacgatggattgtcttagtacaagtccctgcatttctgtaacaaagtaatgaaaggcacagctaatccaagcagacttaaccctattcaacaaacagctgaaaaaatactttggttcttcaaggaaaaaattacraaaaaaaaaagtgtttcctttaacagttgttaattttcatagctgtactccaagagctatataaatattccagaagaaccaaattatgtagcagcgaatgaacatgtgtgacagaatttgtgcattcaacatacctggcagaaaaactagtgaaaatgctaggtagaacagattggtctttaaaatatcagtttcctgtcctttaaaacaaaaattacccagtctaccaagaaaatacaaaaacataaggcagtaagtaagaattgtgtttaggctaggacagtgcaggttatcctcaaggccacatatatcctgcttcactgctgcttgcactctgctgggttttgatccttcttcgggtcatagtctggatcattttcctcatctcctttgtcctcttcctcatctgcttcttcaccttcttcatcatactcatcatcatcatcttcagtagcttctccagtaaactataacactgatcttgggattgtatgctcacgtaaaaagtgaccaattttgaagtctgcagcaaggatagcttcagcakcatcatccagatctccactctcaggaacttcaggaggggcaagaaaattaaagaaagagtcattggaaactgttttagtcacaatacgaattgtcccatgtccctagtgtttctgctgctgcttaatggttttcaaaatgacattctttccttttttccaatctatctggccccctgtacaacccataatttcttgtccatcaaaggaaaagtgatcagaatcatctggttctggttctaacctcatcctatatgtctttgtcagcacttcatttgtaaaatatttactgggttcaaattgaaattctaagacaaaactcataggcaggccagcatctgagaacttcactttggtatctttcacatgcttcagaataggttcatcatgtttctgaagcatatcactgagcaagtcaacattcttaaaaacagrtaaccaaaattcaggaattcctttggggtcttctttttcttcatcgtttttctcatcttcagtcttggccttttctttcaackcctctgaaatctcatcttcttcatctggtttccattcacattcttcctctgtaggttcataaattgtattagtaatctcagattgcttatcaaatagaggctgatagagaacagcatacttcctttcaagatcrtgaacttcctcatagaatttggcttctatctgtgcacctttaacttgcaggtttttgagagcattcactcctcttttaactaccctagctaggcaggttgtcaatgtctgccatgttgtaagaactccaaatatcagtggctactatgagaagccaggcggctggagctgtgcaggcagtgactcagggcagcagtggtggtggggaggagcaagaggcagcactgcaagcagatggygctaaaaaaagagaccctatctctgaaaatggaaaaaaaaaccactcttaatttcaccaacctgagataattcctaaaatttggcattgacctaggcatttttgtatgcatctacaacacatagatgcctatactacatgtctttaaaaatcagatgctatacctatcttggaatcatttctcaaatcatgtaacaaataactttctgtctcatacattatcagtctgaagatttgcatagtattttactttttagatataccctcatttgttaggccagtctcctactactggatagtttgttttctgttatatacacatataagctgtgatggactacctgcatctgtctttggggctttgtgtccaagtaaacactgaggataaatttgtagaagtaagtttattagattaaaggatataacatccttagaatctttcattacatattgcatattgttagcatattgtactgttttactaccagcaagaacatccatttctctacaccctcattagaacacctttttattttgaaataattatagactcacaggaagttgcagggtgatgtacagggaggtcccatgcaccctccactgtgtaccctttcccccatctcccccactgttggacatcttgcataactatagtacaataacaaagtgagaaaattggacatgggtacaatccacagagcttgttcagatttatacgtgaatttgtgtgtgtgtgtatgtgtagttctgtatactttagtgtgcccaagatggtcttcatatgagtcaactccgtaaagagagtatttatcagactaattattggttatatgtacggcatattgagaaaaatagattaccacaaatgggcctttgaagagtttagtgggtaaagtaggtcaaggtaatactgggcttgattaggctgcaaaagtataacttttatttaaatacttcttattgttagatataattcatattcagaaaagtacatacagtgtatatgcacactttataaacagttaataaaccaattatctgtgtccacctaatcaagcgtttcagacactgaagagagaccatttacatttatttcagggtttgggagaactccacatttaagaaggcatttgaattgggctctgaatagaatttgagaaggcagtaatgagagggcattttaggcttggcaacagcaaagaataatgcaagaataatgtttttggagaacagcaagtatagtgatgggacataataggagataaggcaggaagggtgtctaggaacaagactgtagatacgaagttttttctgtcttgctctgtcgcccaggctggagtgcagttgcgcgatctcggctcactgcaacctctgcctcccaagttcaagtgattctcctgcctcagcctcccgagtagctgggactacaggcgtgtgccaccacgcccggctaattattttttattttttatttttattagagatgaggtttcactgtgttagccaggatggtctcgatctcatgaacacgtgatccacctgccctggcttcccaaagtgctgggattacaggcatgagccactgtgcccagtccccctttttttgagacagtctcactctattgcccaaactggagtgtagtggcgtgatctcggctcactgcaaactccacctcctgggttcaagtgattctcccgcttcagcctcccgagtagctgggattacaggcgcgcactactatgcccggctaattttttgtatttttagtagagatggagtttcaccatgctggccaggctggtctcaaactcccgaccttgtgatccgcctgcctcggcctcccaaagtgctgggattacaggcatgagccaccgcgcccagccgaaattcttatctattaagcaattactcattcccctctcctccctccagccctggtaacctctaatttaattaattaattactttattactttgagacagagcctcactttattgccgaggctggaatgcagtggcacagtttgggccagtctctgcctcccaggttcaagcaatcatcctgcctcagcctcctgagtagctgggactacaggtgcccaccaccacacctggctaatttttgtatttgtttgcatttttagtagagactgggtttcaccatgttggccaggctagtcttgaactcctgacctcaggtgatctgcccacctcagccttccaaagtgttgggattacaggtgtgagccactgtgcctggccgaatttactttctgtctctgaatttgcctattgtagatatttcatataaattgaatcattcagtatttgtccttttgtgcttggcttacttctgttagcataatattagactagtactttttgcctgagctagtataaaaaagtactcaatagtgattgtaaaaatagagaggaagggatgatttggggaggcattataaaggtatttgtagaattcagatggacttgaatttaaaaaaagataataccagggtttctagttattaaacaagataggaaacataaggtgctcagtaactatatcaagagatttaatttgtctaaggctgggcgtggtggctcatgcctgtaatctcagcactttgggaggccgaggtgggcagatcacgaggtcaagagatcaagaccatcctggccaacgtggtgaaaccccgtctctactaaaaatacaaaaattaggtgggcatggtggcacatgcctgtagtcccagctacttgggaggctgaggcaggagaatcgcttgaacccaggaggcggaggttgcagtaagccaagagcgcaccactgcactccagcctgggcgacacagcgagactccgtctcaaaaagaaacaaaacaacaaaaaaagagagatttaatttgtctaaagcaagagtagggctgggcacgggtggctcacgcctgtgatcccagcactttgggaggtcaaggcgggcggatcacttgaggtcaggagtttgagacaagcctggctaacaagctatacttatttatttacatattgtctatggctgcttatgtgcttaatggtagagttgagtagttgcagcagagactgtatggcctgaaaagcctaaaatactatgtgaccctttatggaaaaagtttgccaacctctacttcagattgtgaatcaatggaaataaatataaggcactgtttcctgtcctcaaggaaaactagggcagagaaaaggtgcttagcaattcttagttaactgttgatttatgtcagaacatttattatatttacatatatataatttaatgattccttttcccctttaaaaaaattagagaaactagttcataatgagctgagttagaacacatggtaatgggaatgaatgaaattgtttatctgaggctttctcagaaaataagatgagcttaaagcttctagaaagacttctaacttgtatcttctttccctttttgcaatgccagaaaccatatacttcattgcctttcagatgcggtggtgctagaatttgttatattttccatgagacttttgggcgaaccttagaatctgttgatccacttggtggccttaacactattgacattttgactgccattagaaatgctactgtgagtatgtttagctttttagactgtaaaaaaaaatgaggttaaagtttttcttacccatatactgtgtctttttaaatttaattatacagtttattttgctctcatatttgaaattaaaaagcatttttcatgaaaagtaccaaaaatgtgactttmttaacccttgggaagaactgaaattacatatataataagagttctaagttttattttctcagggtcctcgtcctgctttatttgtgcctgaggtttcatttgagttactggkgaagcggcaaatcaaacgtctagaagakcccagcctccgctgtgtggaactggttcatgaggaaatgcaaaggatcattcagcactgtagcaattacagtacacaggtaacggagagaaatgtaacaggtttcacatgaactagaaaaggacatgaagtggtggtttcactgggtggaaggaaatgtataagatgggatacaaggtaaaatctgtagttcccttacctgaaagtgatttgaaataggattcttaaatgtagtctccaaattgaattcagtatttctgtgatcattaagtaaaagaaaatgactgttagcctggcatggtggcttctacatgtagtctcagctacttgggaggctaaggtgggaggatggcttagtgagactatgacttaaaaaaaaaacaaaaaacaaacacgtttttctttcatctaccatttgtaggaattgttacgatttcctaaacttcatgatgccatagttgaagtggtgacttgtcttcttcgtaaaaggttgcctgttacaaatgaaatggtgagctactatagcatagatcattgtaattactattagtaaaagtttaaatttttgcttggctgctttttaataagcattatatggttactttagagtgtaggcataatgttttccagtgtattgggaggaaaaacaagttgagtttcagtctcattttaaaggaaaatttttaataattctggtataaagtgcattttttcttcatattttaatcattgttagcctgcaggcatgggttttcttgaaaatagatttatgattgaggggtgtgaatagctttgctgtattatttagtaccactgatcttaagagaaaattagttccatctttagcctcagtaaactgagcatttatagcacactgttactttgaggtacatcggagtaatctggccacttctgcagtttgcttgttatgacctaataactataatatcgtagttgcttgctactattctgtgggttgctgctatccacacaaataaaaatgctgaaattggcagaaatatgggataagcatttaaaattgccctcatgcctctaattgttggctgggttttttgttttttgttttctttctgatcactaaaagtgcatttgggtccttggctcaggatggtgaaccccgtggaggtttactaagagtacaaaaccatccttggaatgtaagtgctgctgcttggttgtttctttagcaaggatagccctcagattctgatgtctaagactgaatttagcccagaatcattggaccttcattttaatagaccctttttacccagttctggactgataagtgctgttctgatacctgagatttgttaggacagcacataataaagggctcaagtttattctctctgtaagactcagtggtgtggtggctcacacctgtaatcccaacactttgggaagtcgaggcgggtggatcacttgaggtcggaagtttgagaccagcctgaccaacatggagaaaccccctctctactaaaaatacaaaattagccgggcgtggtggtgcatgcctgtaatcccagctactggggaggctgaggcaggcaggagaatcacttgaacctgggaggtggaggctgcggtgagccgagatcgcgccattgcactccagcctgggcaatgagagcgaaactccgtctcaaacaaacaaacaaacaaaaagacttagcaattctgtagagggctggataaattaattttaacttttcttttttattttcctcttaggattttgaactacatataatattttaactaggtgctttatagttaaggctaatcagtcactacctcaggtccttagatgtatcctttacccaaataagttaacatctttaacttatgccttgttacgaacttattttcttattgttgaaaatgaactaaaaaagtgacagggaatagtggatgatctgaagttttaatagcaaagttgcataaagtgttggaatttagatttgcattaggtagatgactatttttccctaagagtaaaatacttgtagttactttaatgttatttttccctcttagaaatgcagttttagatgctgaaatgtaaataattttaaagctagagtaaattattgtttggcataagatttatcagttggaatataattatcaagtaatttaggcataagtttcctgtactttttcggtattgtctgtttcataagttttatatataaatttctcaaagtaaaatatggttgatgtatttttgtatatcgcctaacttactttttttctaggtccataacttagtggcaattgaactggcttatatcaacacaaaacatccagactttgctgatgcttgtgggctaatgaacaataatatagaggtaaatataattcttaaatgctttttcacaggtagaaaaatctgttgtaactcagttatatcaaacttatttagcatggagtaactataaaatagacatgtgccacattagtgcctgctgcatgtcaggaaatatgctgaggggattacattgttttcttaattctcaaaaccacctgcaggcattattactttctgcttatgaaattgaaattcagaaagaatctgaaaattcattgatttggtgtgactggctctattttggtaacttatagtttatacaggggaagtgtgtacaacaaagtatttaaaattcttttcatttggctttgaaagctgtgaaggaaacactcaagaattaaccaacttagcataaatttggaaaagcagagtgcttttttcaccactactggggtggctgcatttcatggatcttttctttccttttgattttaatgtaacaaattgaataagatctcagatggagccaaggctggtggacagagcaatttatccagaagccattttttttctctgccgcttttctccaaaaatagtacatttttctgctactccctaattcagtaagacctgagtcccctgctataccaaatttcctcttctgcatatccatggtgagaaaattgtaaacatgcaattcagaagctggaagggatcctgtgttattgacttcaactctggttaaaacagatggggtggccagacgtggtggctcatgcctgtaatcccagcaatttgggaggtcaaggcaggtggatcacctgacatcaggagtttgagaccagcctggccaacatggtgaaaccccgtctctactaaaaatacaaaaaattagccgggcttggtggcaggtgcctgtaatctgagctactagggaggctgaggcaggagaatcaacttgaacccaggaggtggaggttgcagtgagctgagatcgcgccattgcactccagcctgggcaacaagggcgaaactccatcttaaaaaaaaactggggagcttgaggcttacagatagcagttattcctttggtgcttattttgcagggcactattataggaagcaagcaccttcttaacacaggtatagggaactaatttttggttacatagctgggggtgattcctgttatcagaaaaaattccaaaatgcatacatgagtaggcacttcaaaacactcagaaagtaggccagatcacagttatgttaaaaattagcatgtagacacttaaaggatttagttttttttacattgaaactaacatcatgaaaaacttgtgtttgcggtagttctgttacactgacaaggtcatatgtgatatgatttcagattagtatttttctacaaatgaataggtttctggttttaatgactgtgccagagaactttatgtggatattttcatttaatctttaccataccctgagggcagatcatgtcattaacagattaggacactagggcttcaaaatagttggtaagctgtccagttagcaaagcaggtactccacatctgctggggtccaggagcagctcagatcataactggttagtaacagactagggtgagaattctagataccgtggccttttgctttgtatccctgttcaaaatgtacattttatcatgctaattttttattttgaagattgttaatatctatacttttattatctgttattttttattactgaatacccgcccatgaaaaaataaaattgggtcaaatttctgtcaaaaaaaattattacacatgaaacatcactgtgggctgtgtgcggtggctcatgcctgtaatcccagcactttggtaggccgaggcaggctgatcacctgaggtcaggagttcaagtctagcctggccaacgtggcaaaactgtctctactaaaaatagaaaaattagccgggggtggtggatgcctgtaatcccagctagtagggaggctgcagcagggagaatccattgaatccaggaggcggaggttgcagtgagccaagatcacaccactgcactccagcctgggcgacagagcgagactccatttcaacaaaaaacaaaaacaaaatcattgtgaggctttaacttatatttttttgcaagttggactgtgttcatgaaatacttcctacttaggagcaattgtgactttaacctaaatagtttctactttatctgatgctgcctgtgagagatccatcattaattaacatctacagatttctatatcttcataatcttttttttttttttttttttttaagacagagtctcactctgtcgcccaggctggagtgcagtggcatgagctctgctcactgcaacctctgcctcctgggttcaagcagttctcctgccgcagcctcctgagtagctgggattacaggtgtgcggcaccatgcctggctaatttttatatttttagtagagacagggtttcaccattttggccaggctggtcttgaactgccctcaagtgatctgcccaccttggcctcccaaagtgctgggattacaagcatgaggcactgtgcccggccaatattttcataatcttttacctatcttggtgcttggatatagcagatgctcgggacattctaatttgaatttgtcagtttctttagctttgtacaagttactttgataatattagcaaattagaacagtaggcaattgatcagtgtgttaaattagccaggttacagaaaggactagcagttgtcaacactatttcctggaggaagaaatggaacatttttataggataacctcaaccacagatacttcttcaagatacggttttatgaggggagttgtttgagtttaacacaaaggtgttcaggttagagtgacttttaaaggctttgcggagttttctgtgatctctggacttcaaattccacatggttatgttgaaggcttaccacgttccacatttatgtgaggacagtttacatcactgtttcttagtgggaaagggggagaagatggcagtctgttgcccctcatttgagaatccccagtacagggagccactgttactgacagtgtattgtatccttcaggtgtgtgggcagaaaaaaaaaagattaagaagctttgggttaaatgatttcttatttattttaaaatatgataattatggyatgagtcccaacagtgagaggatgtatctgtaagttactccacacttttcaattaacatgaacattttttagtaggcatatatctcaatacttggataatcacttttgttttgcttgtgtttcttaggaacaaaggagaaacaggctagccagagaattaccttcagctgtatcacgagacaaggtaaaaaaatgtttttaatgcatattcccaatacctaaagatagattgatgagctcagaatattactcagtcctaggagtaattttttcttcttttcctccctttaacactccattggaactaactgagtaaaggcatacaagtttaaaatggkttttgagtgatttaaagataatagtattttgaattcactgacataaatgcttaaaagtagatttaagcatttatttaagcatttaagcatcaagctttttaaaaaaattcagtcagtgactttatcaactttgcacatagctgaaatgactcaagattttattataataagagggtttcttggaaaaaacagtatgcacagaacagaggttttaattactagtaataattaaaatagttgtaatactaaagtgtgtataaaaatcttttaccttgaattctttgccagaaaagaatcttattaaataccaaaaataaaaatgaagcttttggatttggatttttcttatgtattcatctgaaggaaacttttaacaaaggtgacaatggtgaaggaaataaggcagaataaacaatctccyatgattaytttcatytttcatgttattttacgatttcattacagaagggaaaaattcatttatagaatgttcctgaatgcatttttgcatccttgattttttttcccccctggattttttgcctttagtcttctaaagttccaagtgctttggcacctgcctcccaggagccctcccccgctgcttctgctgaggctgatggcaaggtctgttctgattcttaatctaagcctgcatgcctwgttctctggtacaacataatcttctggaaacaatacactgaatagaagaatattaatatgggatactgtgctaaggtcagatcactttagtctaatatatattttaaaattatataacaatgcaatgcatagtttatattgttgacatgcttttgcttgcaatatagaagatgcacacagaaaaagtaatttaaagaggaaattatcctgcactttttgaatttcaacccattggtatttaaattttgcttgttaawttgcatgttttaacatatcttttaacagttaattcaggacagcagaagagaaactaaaaatgtgagtctcttgcttcagaatggaaatgttggtacctttggttctcactgaaacactgtctataccaccattaaagaacctgtttgtgtagtggtatctatctcttgtctgtgttatgttcttaatgttccttttatctaacctgtggaagatggcattaaacgttgttttaattagtaacaataataggctttctcactgttttgttaccttcaagaatagttttaaatttagtattttggtaggaaattcagagatttcctagatttcagagatggaattgtatttttggacattycctttcctctttaaagatcttgagatctgttcagtactaatagatctaatgcttctttcttatgcttccagttagtttgcacttgttaccctatatatagcttcacatatgcttcagaagcttaagcaaattaaaaaaacaaatggggactgtgagagtttgagactgttttcaattcttgataaccattttagagraaaattaaataatgtataaattattcagactcatcgctatttcaagattttctgccatttagctcctttccttaattatccagatttaaagttctgaacttcaaataaaggtttataaatgtcttatcttctctcagcccactgtgctcagatattaatcaaaccatctaaatcactgcacaagttttatttcattcatgacgtcacactgaatgtgctctctctccttaagatttcatttggtatgtcattcatgtatagttaacaaacatttaaaaatctaattactcatttttaagttaatgtgtaacataaatatactacttatatttaaatgtagttcaccttaactgacatactaaagacagattttagcaaatattttgattcagaatgatacctcaaactaccatttttctaactgccataatcctctattaaacttatataatccatttttagattgtaagatcttaaagaatacctaaaaaaaaccctcttaaatgttgatgaattgtttttccattataaagtcatttttgacttttagaagtcaagactaatacattttctagaaaacaaggtacaaaagcacttgtgattaatggtagcactagatttctttcagcaaatccttaagagtacagaggttgaggggacttctgttgtttgtcacattccgcatttgaaacaactcacagtgactgtcagcctaagaatagcaaatgtagtcttgctttttgttaaagagttcttacttataccttatggcatttttgttgactattagaaatgtaaattgagaaacatataaactcttaagttcagagacgtaagttcatggaacttttagagtttaacagtgttaatgattacttaagaaattaaactgaatagcagttctttgtgcttttaacgagtagttttgtttttaagggcagcatatacttttcctacaatttagtgtttgaagggtgggagaagaggaacgattttgaaaagttagcgaatgataaagaaaaaaggaattaaatagaacataagttggttgatgccttgcaaacaacttagagcagaacttctttattatttagataggtcagggttccagttatacatgctacctagtgtctccttctgacctcattatctgtctgaataaacttcagatgggtactggatgtatattgactactgtcaaataaaatgaactttgttttagttaaggtcagatatgatgtggttggtatgttttggaacatgttttttcaggttgcatctggaggtggtggggttggagatggtgttcaagaaccaaccacaggcaactggagaggaatgctgaaaacttcaaaagctgaagagttattagcagaagaaaaatcaaaacccattccaattatgccagccagtccacaaaaaggtcatgccgtgaacctgctagatgtggtaagccatgacaatttggtttaggtaataaggtaggtgaccaagttagtaggaaaacgattagacagaaagaactaaaagtctcaaaaacttacataactttcagatgttaaagctgccattttagtgtcacaaaagtaatattttttccccctcatccctatttagccagttcctgttgcacgaaaactatctgctcgggaacagcgagattgtgaggttattgaacgactcattaaatcatattttctcattgtcagaaagaatattcaagacaggttagtattacttaatataaatgacggactttaatacttctggatgattctgtgatctgttttgaaaaatacatgtatttttacaattttaggtttttattctaaatcatcaagtggattttctgatagtccttgggtaacttgtagcaagacccattttgttaacatagaatgactaggacctcatgtatcagctagaaaaagctattaaaaatgagagattcttttgttctatctggctgccacattttgagtcatttaakaaaatctttttcctaaattttaatttagtagtttcattaattattttggctagtaacactgacttgcctttttaatttaacttggttttccaaagtatcaaaacgaatgtcttttactaggaaatatgtgtattttttctcgttcagaatgttttttcatgtgtctagtccctactgcatcttctccttcatgttgcctggtatgtcatttcatgcagtaatagggagaatatacatttagttgtgtgaagtgatctattagaaaatattctgcatccagtttttggtaatctgtcagcagctaagatgaattttactgcacagagtaataaacagtctaatacttcatattgaaataaatgatttttgtctgtagaaccatttatcttttttgcttgtagactttttaaaccygtagcttgtagtagaaataacagttcctagtgttttacactgtgggcctgaagaaaaaaattccatttgtttccttccttgcccccatcctctgcagaaggtgtttttgagatggagtctcgctttgtcgcccaggctggggtgcagtggcgcagtcttggcccacttcaacctctgccttctgggttcaagcgattctcctgcctcagcctcctgagtagctgggataacaggtgtgcaccaccatgcccagctaatttttgtatttttagtagagacgggtttcaccatgttggccaggctggtctcgaactcctgacgtcaggtgatctacctgtcttggcctcccaaagtgctgggattataggcgtgagccactgcacccggctcacttaatgtttttaagcctcatccatactgtagtatgaatcagtatagtcacgcaccacataacattttagtcaacagaccacgtatttgaatgtgttcccgttagattatgataccatgtttttgctgtacatttcctatgtttagatacacaaatactattgtgttacagttccctattcrgtacagtaacatgctgtacatgtttgcagcctggagcaataggctatcccatatagcttaggcgtgtcataggctataccatctacgtttgtgtaagtacactctgtgctgtgcatgtaatgaaatcacctaataatgcatttctcaaagcatatccgtgtcattaagtgacatatcttttgtgtgaataatactagattatgtagatatactgtgtttaagcattcatcagctgatgtttggatttttctcacttcttggctattatgaataaatgcttattgaagagttttgaaataaagatgatgaaaagaaggtaaagtatcaagaattgttgcttttgtttttttttttgagacasagtctcactctgttgcccaggctggagtgcagtggcgcgttcttggctcactgcaatctccacctcctgggttcaagtgattctcgtatctcagcctcccgagtagctgggatcacaggcatgtgccaccacactcagctaattttttatttttagtgcagacggtgtttcaccatgttggccaggctgctgtcaaactcctggcctcaagcagtccacccgcgtcagcctcccagagtgctgggattacaggcatgagccactgcgcctggccgagaactgcttttcttaatgtttaattacagttaagcaaaaatctaaagggcgattatgccattaatgaaatatccaaagtagtagtgttcttacttaactttatttcatgaggttagcatctaagcccaaattgttaaaagtagaattttggctaaaattccataatttggttgtgttttgcagtgtgccaaaggcagtaatgcattttttggttaatcatgtgaaagacactcttcagagtgagctagtaggccagctgtataaatcatccttattggatgatcttctgacagaatctgaggacatggcacagcgcaggaaagaagcagctgatatgctaaaggtattgtggaccttttgattttttatacttgggtagtagatagaaacatagaaatagttttaaatgcagtttgattcttggatatgtatagtctttatattctagctaggcttgtttcctgttggtacttgataagaatctttttttttttttttttttttttttgagtgggagtctggctctgtcgcccaggctggagtgcagtggcacaatctcggctcactgcaagcgccgcctcccaggttcacgccattctcctgcctcagcctcccragtagctgggactacaggcgcccaccaccacacccagctaattttttgtatttttagtagagacggggtttcaccatgttagccaggatagtctctaactcctgacctcatgatccgcccgcctcgacctcccaaagtgctgggattacaggcatgagccactgcgcctggccggtacttgattagattctaattccagagaagatattggttagtataaactggttagttataaacctaccacatatatattggaaaaattaccctgcgtaattcagattaatttcataactttataataagcatttaaaattttttttcctttaatgcaggcattacaaggagccagtcaaattattgctgaaatccgggagactcatctttggtgaagagaactatgtaatactgaswctttgttgactcaaaacttgctagttactgcctacctgagtagaakcttatttatgaactcctgtgtattgcaatggtatgaatctgctcatgtggagactggctataaactgaaaagtgtattccaaattgcagaacacatcacacatttaatccaaataataaatggctgtttctaaagtttcccagtatatataaaatacatcaagtctgtcttgtgacagtttcatctgaacttaacttaaaaasaactgttaatgttctagttgtgcaaagcagtttgcctgtggataagatgacctgtgtaataatctttgttagtagtcttaaagctgctgccatagtcctccaagaagaaagcaccaagacaacatttcatatgactataatgcatgtactatataagctgatctggctttgaaagatgtgagttggcaagttcctcacatagagtcattgtattccacctgtccttcaatttagttttttctgagcttctttgcagcctttgatgtgtttttaagaaagctgaatgcacaagaggatctgtgacactgacatggctgtggtgtgcataytgtgtagttacatagcccttccaattctgggtccatttgcactagcaaattaaaatatgctttgattcatacttaaacctgaaagcaggaatgcctacattaattcctacattaaaaacagccatctacccttgattatctagwaagacttggtaatgatggtcagttccttttagatttcagaaaatcaaatgatgacctaaatttcccttaatttgcaaatacagtagtaattaaggtacatctctaaagtggagcacttacaccaggctctaagattcactttgaggtggaacttaaaaccagtgtactgtatgtatgcattggtaatagctacttttgcttcatagcttcataccaacaaaatatatttattagaatagtatgaaagtactggaggagctgaaagaaaaacacccaaggctgggcgtggtggcacacgcctgtaatcccagcactttgggaggccgaggcaggtggatcacctgaggttgggagttggagaccagcttgaccaacatggagaaaccccgtctctactaaaaatacaaaattggccgggcgtggtggcgcatgcctgtaatcccagctactcgggagggtgaggcaggagaattgcttgaccctgggaggtggaggttgtggtgagctaagatcgtgccattgcactccagccttggcaacaagagcgaaactccgtctcaaaaaaaaaaaataaaacaacacccagatagatacacatactccttcagacttacagacctaagctgcatttatggggtagtgatgaggtttagaacatatacatattttgttaaaattccccagatgattcttgktatgaacgactatattataaattttaagatgtacttagaaatccttaagacatctagccccgtctctaatagacaacacatttatattgcagatattacttttttttcagtttatgaccaggtatttatgaaggactattggcagggaaaatatgaatatgttaactttagcttatggcatcaatttactaaggaacaacaggctcaccaactgatgtcaaacataaaaacccccacatcagtctgatacgatatggtactactttgaatctgttactagtaccatcttgacagaggatacatgctcccaaaacgtttgttaccacacttaaaaatcactgccatcattaagcatcagtttcaaaattatagccattcatgatttactttttccagatgactatcattattctagtcctttgaatttgtaaggggaaaaaaaacaaaaacaaaaacttacgatgcacttttctccagcacatcagatttcaaattgaaaattaaagacatgctatggtaatgcacttgctagtactacacactttgtacaacaaaaaacagaggcaagaaacaacggaaagagaaaagccttcctttgttggcccttaaactgagtcaagatctgaaatgtagagatgatctctgacgatacctgtatgttcttattgtgtaaataaaattgctggtatgaaatgacactaaagtttgtcaaaaaatgaattcttaacttttctcccagagaaagggagacaaaaggagctttttaatacctaatctactttggaacataaccgtatagagtacgaaaaattttacgacttttttcctaccagattctgacagttcaccaaggtattataacatctccatttttgcgtatgaagacagtgacttgctccaagtaatccaggtagtaaatggctagaatttgaacactaaagccatgctctgctgcctgtaaggttttcaaaagaaatctgattaatcatttcgtatgtgattcacttgatcctcaaggcaacagggatgccattgccttgatttttcagatatggaaatagttctggagaattaatttgcctcatgtttgaagagctgaactcagtcttgattccaaatcctttaagtttgacctgaaaactttccttacctggatactttttgatattctcatatgattgcatatttggtataattggctttatttttggggggttaactttttaatttacctcaagttgcaatctgcttggggggaaaagctgaaacttaaaaccaatttaagtttctaaatttataaaacattgctaccttaggaatccactgacaacaaggcttaatgtgaacagaattatactggaacacaggcaaggaaccagaaaactgaattagaaactttctgaaaagtcacgtactgatttttgtactattatttgtaaagaaactacttactgtaatttctcaaagcaaccatggcctcatctaactttttctcctttttaagaactacatttgctctctgaactacaaaaaaatcaaatttctattcaaagtttctaatactagttttcccatttctaatgtggacactagaggccctgatgattttataaacaactatataacattagtgacatcggtgctccatacctgatagaaaagcagctacaattccttttttttttttttttttttgagacagagtttcactcactactcatgctgtctcccaggctggagtgcagtggcgtgatctcagctcactgcaacctccatctcctgggttcaagtgattctcgcagctcagcctcttgagtagctggggttacaggtgcctgcaaccacatctggctaatttttatattttcagtagagacggggtttcgccctgttggccaggctggtctcaaactcctggcctcaagcgatttgcccaccttggcctcccgaagtgctgggattacaggtgtgagccaccatgcccagcctcacaattccttacactacctctttttcattgttcctcatcactacaaaaaggagagcaggaagggtaagataggaaagcagcatttctttctcttctgaagtataattttaaaaagagattaaccctgaaaatcatggttttctatggtaatcaagctttgtacatcagaaaataaaacatcccattattaaacaaatatttattaaccggcccataaaaataatgaagttactcacactgagtcctagtccattctgtttttctgatttgcataagcaaaggtctaagttctggagccaacccttcagaggtcttgagaatgaatgatgggtaagtttatttggacaaccagaaggacttttcatcacaactgaagccattttataatgtagaaatttctttttcctattttaagtaaggaaagtccattcttgagaatatgttgtccaacaattaaaacactctcaggatttgttacttgttggtgatttatgctgactccgccttctgttatcattcgatacctaaaaaatagaaacgtttagtaagtagagagatccaatcactgttgatctgtcccccaaaaaagactgtttcacttagatttcagaggctctccaattgagaagatttcatttggcactggactgttaccttcatgtttgctctattattaatagattctgcctctctttactgctctttgttttttgttgtttgtttttgaaacacattcttgctctgtagcccaggctggcatgatctcagctcactgcaacctccgcctcctgtgttctaagtgattctcctgcctcagcctccagagtagctgcgattacaggtgcatgccaccacacctggctaattttgtatttttagtagagatgggtttcgccatgttagccaggctggtctcaaactcccaacctcaagtgatccacctgccttggcctcccaaagtgctgggattacaggtgtgaaccactgtgtctggccggaatttacgccttgcaatctgctcttttaaagactccgtctcaagaaaaaaaaagaaagacctaggagaagttgttctaggagcacactgggtaggtgagggctgaacatttcactgaaaaaagagatacttaaactgggagtgaagctaccttgacaatcagggcaggaaacatgggagcagctagaaagaggtgagatctgagaagacagggctacagcgtggctagatcttggaagtccttaagaaagaaaaatggtggttttctctcatctgaatgttaccaaataaaattaagaaaccactactggacatggttttaaagatatttttatacctttatttttgggtagagacggagtctcactacgtccttgcccacacagatcttgaactcctggccccaagcaatcctcccgccctcagcctcccgaagtgctgggattacaaatgtgagccaccatacctggccatggacatggttttataaaactcatcagtaaaatattttctacttaaggccagattcctttcttttaggaagtattattttacgctgtctgctagtttccagatcatgttctatgtttaatttaaatgcaccaaacctatttagcttatataatattaaaaaaaaaaatcagtattacttagagccctggctaaatcagatgtggtgtcatttttagtagtggtaaagcttccagtattagcgaacacactatagtaaagttcagaagaaaacgaaatctgcttccatagtgaggaaaattatttgtctcgctgacatactacagggaagtatatgacaccagcctcaaattcactgtgtgttaaaccagcagatgagggaatcactaaggtggagtggcaggtgatgcaaagggagacaatgggtgctttttccaggcagaatagtctaggactctttaggacacaggcaaacaatccaagacagttgaaagagaacaactataacaaatgtcattcataatcatggccatgatatggccgataaccatttgacttctgtgtgaactcctgcaaaagaggcacctgggggtcttctggctacccaacacttttccttccacctcactgttcatttaaaaatggataagcatcaattatatgctgaattattttttgtgaaaaaccttatttactccttaatacctcataactgattaattaaaatattctactcaattcctgaatagaaaatgcaattctcaaggggattattatatagtttacaataatagtcttatgacgttagtaggttagtgcaaaagtacttgcggttttggccattatatgctcatttcattttcagaaattcagttaatactatagataggttaggtaacctttcccatccccgaatataaaaaggatacagactatgagaggggctgtgttaatctgttacatagggcctctgtttctgcatccctctaaaactgtgaccatatccctaagccgtacactgatgccagtgtatttactgaacatgtccctcaaatgcacttttccagtgttggaggaaagactgactgggttagatataataagagacagtataggagtactgtactattatagaaaatataaagtattttcaacaataagtactctcaggctatactttattcttggactaaactaacttttctaaggaagagatgccactaaagcactatcaggaaaacatcctctctggaaacacatgctgtgaactgtaacattttatttattttttgagacagagtcttgctctgtcacccaggctggagtgcagtggtgggatctccgctcactgcaagctctgcctcccgggttgatgccattctcctgcctcagcctcccaagtagctgggactacaggcgcctgccaccatgcccggctaatttgtatttttagtagagacagggtttcaccgtgttagccaggatggtctcgatctcctgacctcgtgatctgcccgcctcggcctcccaatgtgctgtgattacaggcatgagccacttctcctggccttgtgaactgtaacatttaatggtgaattaactgtaaatctaaaagttaaataatcttaccctcggggaccatctggaatggcatttgctttgcggcaagtatctaggacacttgttccaggatcgagaaaaaattcagaaaatggagcttctttaaacaactcttttaactcctgatcagacatgacctccagtgcatctatgctactgtgataaagggcttgtgtacacctgaaaaacacattttaagagctacatcatataaatgtttattcaaatacatgttctaatacccattaaccaattatagagtgtccaagttctagactaaaagtttttttttgagatggagtctcgctctgttgccccggctggattgcaatggcatgatctcggctcacagcaacctctgcctcccgggttcaggcgattctcctgcctcagcctcctgagtagctgggattacagacgtgtgccaccacgcccagctaagttttgtatttttagtagagatgggggtttcaccatgttggtcaggctggtctcgaactcctgacctcgtgatcagcccaccttggcctcccaaagtgctgggattacaggcgtgagccaccgcgcccggcatagactaaaagttttttaaacatctatctggtataattcataaacttaattcaagataatccttctttccaataaacaggggctattttaaattgctaagtcaaatactgacagtccttgtgataaatgacaagataatcctaaaacatactcctacttttctcatgtctatccactgaataactaactatcaagtgttaatcatactaaactactaccttttagcagaatccaatccttctcgtccatgaacaagctttgttacttctgctgccagtcgtttctgaggaccccgyctttctggctctttgacatgcagctgcatgatatgatcaatctctggaaggggcaggaaagtgaacagcttcaggtacctttgagacaaaaaataaagagttacacttatataacatacctaatttttatctccagctcttctaccctttaaggttatcctgcttacttttaaatatgaaacaaacatacagaaatgtactgaacatagtaggtcccatgcacacatcacccagatttaaggtgttactattttggcatctttgttttcaatttcttttttttttttttgagatgggggtcttgctgttgcccaggctggagtgcagtggcatgatcatggctcactgtaacctcaacctcctgggctcaagcaattctaccacctctgcctcccaagcagccgggaccacaggcttgtgccaccacgcctggctaatttttatattttttttgtaaagacggggtctcctgtgttgcccaggctggtctcaaactcctgggctcaagtgatcctcttgtctcagcctcccaaagtgttgggattatgggcaggagccaccaagcccagcctcgtattttctttttaaaaggaacaaaataggcatagatgaaggccgcagtccaatcacattcccttccttgccccgagataatcataaatctaagtttatgtgctgccatctttcccaagcatgtttttatactttcatgtgcatgtggccataaaaaaaaagtactgtgtaattttaaaaactgatataaatcatcatgctctgcataatgatgtttctgtcaatgatggactacatatatccgcggtccccaacctttttggcaccacgaggcggcggggaggggaggtggtttcagaatgaaactgttccacttcagatcatcaggcatttgttggatcctcaaaaggaatgcgcaacctagatctcttgcatgcgcagttcacaatagggtttgtgctcctatgagaatctaatgcaaccgtggatctgacaggagatggagcccaggtgtaatgctcgctcgcctgccactcagctcctgttgcgcagccctgttcctaacaggccacggactggtacagtccaacagtggttcataacattataataccatagtttactgtactttttctatgtttacgtatacaaatacttaccctcgcgttatcactgccttcagtatttagtacagtaatgtgctgtatgtgcttctaccctgggagcaacagggtacactgtatagcctaagtgtgtagtaggctatgctatctatgtttgtgcagggacactctacgatatttgcaatgatgaaatcacctaacaacacacttcccagaatgtatccctattgttaagtgatatatgactataatatcatcctatatgtattctctttttctttggtgaaatatatataacacacagaaaaaagtacattattcacaaagatatagcttaatgaatcataaaacatctatgtaaccatcaccatggtcaagaaatacagtattgggccgggcgcagtggctcacgtctgtaatcaaatagtgagtttggcagagttgctagatttaaaggtaatatatataaagtaattgtatttctatacaccagaaccagatagaaaatgcaatttttgaaaagattatctaaattctctaggccgggtgcggtagctcaagcctgtaatcccagcactttgggaggctgaggaaggtggatcacttgaggtcaggagttcgagaccagcctggccaacatggcgaaaccctgcctctacaaaaatacaaaaattagctgggcatggtggcgcatgcctgtagtcctagctactcaggagaatcacttgaacccaggaggcggaggttgcaatgagccaagatcatgccactacactctagcctgggcaacaaagtgagacactgcctcaaaaaaaaaaaaaaaaaaaaaaaaaagattatcaattctcaatacatcaaaaccccaggactatatcgtcaaacattctaggactaaatctaaagagaaaaaaacacaattaccaaaattttgtaataaggcatgataatcttccactctgttcttcaaaaacatcttggccaatcttagccctttttatttctatgtcagtgttacaatgagcttgtcaagttccacaaaaagccggtttagatatggttggcactgtactaaatgtagatcaaatccagaactggtatcttggccgggtgcgggggctcatgctgtaatcccagcactttgggagtctgaggcaggtttatcgcttgagtccaggagtctgagaccagcctggggaacaaggtgaaactccaccattactaaaaaaaaaatacaaaattagctgggcatggtggtgtgcacctgagcctgggaatttcaggctacagtgagccaagactgcgtcactacactctagcctgggcaatgggagtgagattctgtttcaaaaaatacaaaaaagaactgatattattt

SEQ ID NO: 94048 - DNA, 101119 bp, Homo sapiens
  misc_feature (1)...(101119): n = A,T,C or G
gtgtcatttattagttattttgttcatgttcttgaaattgttaatttcatccaattgaattaatcaatttttgtctttttttctttcaattatctttagctaaatcaatcccatgtattttttggactaggaaaggcaacattggccatttagagcctcaatcttgtggtcatcataaaggctgcaatgacttgacagtggagccaccctacttactcagaattgctgcacataatctagtttgccaagaagaattttcagtatggtcctgaattttattctttccttacaatatttccataccattggtattttttttcttaaaattattttatgttggtggtctttttaagacaataaaatctaggctatatagatggtcataatatacaggaattttcctgtaatatctagatggagaatgctatatgggcccatctattgtcaaatatatatgcttaaatatgtatagaaacacatatatagatatatacatataatatgtatatatctatcatactatattgtggtaacaccttgacttaagcttatattagttacttcattgggagttcttttggataatacatacaataccttcctattactattcaagtttttaatcacttttacttcccctaaatgacattattttcaaactcaacatttaaagctatattgacttttgctttcaatatttagcagtgccaaaaagttattgttttcattgcctgtgtcacataaaatgttactgtacttttagtatctcaaaaatgaactagatactgtgctgattatttctctgatatgaactgtaaatattcattcgtaattatttttatttagtatttgttcctttactgttaaacttcttaaaccattatttgaagaagattcaatagcctggaaatgatcagctgtaagtaaatagcttcctttgtctacaggattcaactttgcagtattttcacatgttagagagctataaaaaaagcataaattaattttcccataaatcttattgagagttcaattcttgccttaagaagcctctatgggatgggagaatatttactttgctttaatgtttaacattaaagcaaggtggctgaagagataggtatttcataccttctccaagatgacaaattgctgacatacttggatcctgtgtgaatcagcattgttcaaaaggaaatattttacatagctttactagattttggaatactttaattccctaaataacattattattgttagatgaagccttgcttcaagataattacctacctctctgcaatgggcattatcatgtagatattgtataacattttcattgtcttagaggttttaaatgtaatggcattacatttaaaaatgtaatgccattcatatcatatcatgcctaacttcaaggtctgtttgatatttttaatcatggaattgattttcaaagctatacagggtagacaagctggcgatgactttgttgaatcttccattcttgatgctgtacagagagttgacagtgcaattaactccacacgaagacatttgttttcacagtaagaatttattttacacagattgaaaccttgttttcatttctgttctacttagtttttatcatctccataagtcacattatagtgcatatgcaatagagtgctttctttagtccttgtgtatgcatccccatctgggctagccatcattatcagttcaccctaaaaaaggggaaacttcttccccatagaatctaaatggcattaatttatgccaaaggtccatgctatacaggctgacaatagacactaggcaatgggctgggttacctcagcatccaccaaacagtgtcagatgcagtgctcctgcaatgtgtgaattgagaatgattatcaagttgaacacaccttggtataaactgggagcctacgacaaacattatgtttaggatatttggcattttacattattttaatttgaattggaatgttcatggactagtgaaaccttccaatcccattaacttctctgtgtttgtaacatcaggatgcattaacaaaaaaatgattgttggtttcatcataatcggataaagtatatattcagtatttgcagttagtggtcaaaaagggacatcgtaaaatcccaaattgagtctcttctggcttcctgcacatccataaatagaatggctttgtgatcatgcatgtgtgttctagaaccacgcagccgatttagatttatattctcttcctgattcctcacttcattactttctgtctgggtgaccttgagcaagtgacttaacatctttgtacctcaggctccttgctctctaaagttgggataacagtaggatctacttcatggatgtgcttgctaggaagaaaaaataagataatatgtaaaaagtgcttcaacagtgcctggagaatagaaagtgcttaaccaaagtgaactattagcatcattattattattctgtgacctcaagtagttaagattcaagacatagaggatgagatgtgcctcagttgatcaaagtctctaaaacagtttgcttcacattctcagtgcttttaaatttctttttaacatatttggttcagttctacaaatgtgcataaactgctattatgtgctggtcagtgggcttggtatttgggatacaagataaataataggtcaacatctcatcagcaacctagttctttctttagcagaggagacaatatgtcagcaattcaagtacattttactgagtatataagacacatatttaaggatacaggaatactagagcagatggagtgatagcttgtcagagctctcagtgaaactctacagggagagtgaggcctgaggaggattctaaaggcaaggaggaatttctaggagattacactcagggaaagagaagacacaaaatgccaagtcctgcagaccgagagtattgcatagtacttcagaaggtttactgagcctcctataatccattcatcaaccgacccccccagtttagaaccccaccatagatgttgtttcctaaaactattgtttaaatcatccattcattaaaaatatatatttttgagttcagcactgggactaacatttggaataagttgttagcaaaataggaaaagaacccacagctcctctgtagagcctctattgtagtggtggagctttcattcttctcgaatgtttgggaaatgcctttttaaatgcacagtatttgcaagcttcatggactctgctgttttgccttgtaaagaatcatgtgttttgtcatttgcagaaaacctcacacctccagtgacctgctggctcaatttcattacccgcgtgacccactgattgtggaaatggcaagagcaggggagatttttgagcacacgctgcagctgatacgggaacgtgtgaagcaggggctcactgtggacttggaaggcaaaggtcagccacaaagccattttattctcagcctactgcccacagaaaaactgaccaccaccttagcaaaggacactgaacttttaatctccagaatatcatgggatttagaaattaatttactcactacttttaccaaataaatgcagatgtttctcataggaactgtaattccaaagtaaggatgataaatatatattcaaacttgtctcaacttttaagttatatgtatagagaacaaatctagggaacctacattaagtgaacttgtgtttcaaatgtaaaagatattattgtgtcttatagagaaatgctttattaccagggggatattcttctacttatcctttcaatcacctgaatcattcagtgaatttacttgaaatttcttctaccacttataatatttataatacctccccagttcttttgatttttgtttttttgttgttgttgttttgttttttggtatatccaagttcttgtgtatttctttttaaaaccagacatctagttagtagatgtcaaatgagatgatatagaaagctttcagattttctaagttgttctctttcaaatgaaataagtgaatgtgattctttgctatatactatttgtgctgtgagtacagcatcaatttctattggcttaccctttctttattctcctttaggaaatcaaccgagacgtggtgcagaaggcctatctgtgagcttgcctcagcccttagagctctgtacaatttctctaactaactggcatttgactgtccctggtcacccagtatgatgggttttcaaagcttcctgaggcaaaatatccagatacccaagattaagatatctcaggatccagccagggactggctaacatggataaagtgcaaatggtcccattattgcttgccagtttctgaagattaaataaggatggtaacttttagtatgattagtgaacaatctttgtagcactgggagaatgctggaagtttaagccctgttaaaaggtagagctccaagcatgtcccttattattttgcccgtttgccagggaatgacagcttatagtagttcagaaagttgttgcttaatccctccttgtcaagtatcatgtgggttaatattcacatgatccatattgatatttctttgaccttgttctctagaagcacaaaacttgagagaaaaaattctgaaatgaaacaaacaaaaatcaacaaaacaattctgggatgtggaagaacaaatccttgccaacatcgttcttgtaaaggcacagagtagaagttaggagctggctggcacctgttctctttccattttgcttcttctagcagctagccattgtttacaggatgaacagcacaaaagtaatcccgggtcttctggaaacatcttttagtgtctggctggcatctgctctccttccattttgctccttctagcagctagccattgtttacaggatgaacgctcaaaagtaatcccgggatcttctggaaacatcttttagtgttatagaatgatccccccttttgttgtgagctaacgaaatgtttttggaagtaagaaaggcctcttttcactcagggcgggcggggtgggaggtggttcccgcagcatctggagttccaagttgcccgcgccctcccaggcccgccctcctcacggctttcgccgcttgcctttcagaattccggtacaatgacttggtgtccccgcgctccctcagcctcatcgccaatttatctggatgcacagctcgcaggcctctgccaaactgctccaaccggtgtttccatgcgaagtaccgcgcccacgacggcacgtgcaacaacctgcagcagcccacgtggggcgcggcgctgaccgccttcgcgcgcctgctgcagccagcctaccgggacggcatccgcgcgccccgcgggctcggccttcctgtgggctcccgccagcccctcccgccgccccggctggtcgccacagtgtgggcgcgcgcggcggccgtcacccccgaccacagctacacgcgcatgctcatgcactggggctggtttctagagcacgacttggaccacacagtgcctgcgctgagcacagcccgcttctcggatgggcggccgtgcagctccgtctgcaccaacgaccctccttgtttccccatgaacacccggcacgccgacccccggggcacccacgcgccctgcatgctcttcgcgcgctccagccccgcgtgtgccagcggccgtccctctgcgacggtggattcagtctatgcacgagagcagatcaaccagcaaacagcctacatcgatggctccaacgtttacgggagctcggagcgggaatcccaggctctcagagacccttcggtgcctcggggtctcctgaagacaggctttccttggcctccctccggaaagcccttattgcccttttctacaggcccacccaccgagtgcgcgcgacaggagcaggagagcccctgtttcctggccggggaccaccgggccaacgagcatctggctctggccgccatgcacaccctgtggttccgggaacacaacaggrtggccacggagctgtccgccctgaacccccactgggagggaaacacggtttaccaggaagccaggaagatcgtgggcgcggagctgcagcacatcacctacagccactggctgcctaaggtcctgggggaccctggcactaggatgctgaggggttaccgaggctacaaccccaacgtgaatgcaggcatcattaactcttttgctactgcagcctttagatttggccacacattaatcaatcctattctttaccgactgaatgccaccttaggtgaaatttccgaaggccaccttccgttccataaagcgctcttttcaccgtccagaataatcaaggaaggtgggatagacccggttctccgggggctgtttggcgtggctgctaaatggcgggcaccctcctaccttctcagtcctgagctgacccagaggctcttctccgcggcttattctgcggccgtggattcggctgccaccatcattcaaaggggtagagaccacgggatcccaccatatgttgacttcagagttttctgtaatttgacttcagttaagaactttgaggatcttcaaaatgaaattaaagattcagagattagacaaaaactgagaaagtaagtatgcaaatgctgcctggatttaaacatttcttaggagaggtaaaagtgttaaaggtcattttgtgtggctggaatttggttccctgggggtgctgcagagcttttagtacttgttattgttggagaggtttaatattaaaggaaggattcaccagaaaccgaaatccccctttctgctcctttttctatccacctccttggaaatgcaaatattgctgcctcctattaacttgcatttcagttaggagaggtgaggtaagcatatctagcccattcgtgttctgcggtaatccaagcaaggcccttttgttgatatgaggccatacattcgatataaattcataaaataaactggccgatcacataggccttcttagggagagaaaagtagtgataataaaaacaaattattttttgtggtagttctaaattcatggtcggaatttaagttagggctttttcactgcatccttaatgtctttcggtaaagtattactgttaactttttctacatacgggatttgaagtttcattaaaactacaagtatacatttccaggaatgagattcaactgttcctcatggtcaccaacattcctcctttaaaaatatttttttraaaacagtttcacaaagaagttttgtctgtagtaggttaaatataggagactaatatttattaatattttaaggtatatttctgtgaaatatttcaaagaagtttaaaattataagttctatagccaattgtcaagattaggcctttctttgcaaaactaaggctataaatacttctgtgtcaatagaatttgtcacatatgtggaatctcaaactgtgaaaatgtgtaatgtatttaaaagaaatcagagtaccctgcagattgaatttgcacatttcttttggaaaggacattgatttggattcacgaagacctggtttaaatctctgttctaccacccaatagtaccgagagcctgtgaaaagtaaacagttttcaatctcaggatacctataaaatgagaaagtagcaccttcttctcagaattgtttaaagattaaattacataaaatgcatcagatacttggccccattcctcctgcatcacaggcaatcaataaatgttagccgtagatgttttattataacatgatcatttcagttgtcagggacattacgatattgcacatctgctcagatgtagccctgtggtaggcgtgggagccgagatgactgaacagcatccaccagggaaagcctgacagcgtgcgggggagccggggagctgctgtgaccagtgtggaaagggcttggtagaagtcgcgattaaatgctgtgagcacacagagctgagaaatggaaggctcacagcaagccactgataagagatgtcatttgatctggtcttagaagtttaagtgtaagaggctagatgatgggggaacaccaggtggcatctggggtgagggactggaagcaggaaggcatggggttgagtgtcaggaggagagaacaaagaggtaataggggacgggttttaaagaggctgtgtgccatgcaagggaatctgatcttcactccgtatttaactctaaagcaagagagtgacctgaagagagactcttccctgacatggtaactggcaggcatctggaaggtgtattgcaaggaggagagactagcataggagccaagaatccaacagctgctagagtcatccaggagaagctcaaagatggcacagataggcttgtggccatgtatgcaatcctatcagaattttaaatgtttcctgtgggtagattatctggattggaaaaagttaggggtatgacgtcttgtgcaatttgagtctcacttctcaattggcagctaacttgtaaattcaccacaaattagagtacccggaatgtttcttcttacaaatttcctgtcccaaattcctcctaaatcatgtggttctagtgttagctgtgttagcctccactgtcggccactgtccatccttacagtggctgatgtgaagtatgagtggcctttcagacggacagcagctggggagacttcattgagcattcactcagtagcctttctatttgttcctttcatgcctatgggatattggccccaagagtctgtgcagcctaaacattgagtcattatccttgcctgggagaatgtttgaactagtggaactctatgcagcctggtgcttggcatcagccagaggaggagagagcattgctgactggcatgggtgggttgccagaagtcagtagaagccagatgctttttgcttaggctgtcacagatgcctgactttcccctttcattaacggcaaatttgtaaaatatgaaacatatactcattcaactatgagtgcaaaataaaatggtttttacggtcagttctcaaatatgtagattgcaatttctcaggagctgctgaagatgatatagctttaagtagtttaatttacaaagtatttctttatcttattacttcttttcctttttgtattaatttacaagtgtggttttaggactttgtttttaaatcacttcagtccactgggtggaggcccttgtctctgcctctaaratgtatcttgagccccgcatcctcacatggccaagtggagggaagacaaaaggagcaaatgtcgtgtgaagcctcttttataattcattaataactttaatgaggacttcacyctcattgagaggtgacggcatgctggcagccctcgcagcaatccctcgctctgggcacctcctcggcctcggtacccactcaggccgctgttgaggagcccttcaccccgcggttgcactgtgggagcccctttctgggctggcccaggcggaagccggctccctctgcttgccaggaggtgtggaaggagaggcgcgggcgggccagcgccagttctgggtgggcgtgggctcagtgggccccgcactcccagtggctggccggggctgccggccccaggcagtgaggggcttagcacccgggccagcagctgcggagggtgcgctgggtcccggtgctgagctcgaattctcccagggcctcagctgcctccctgcggggcaggactcggacctgcagcccaccatgcccgagcctcccccaacccttgcygtgggctcctgtgcagcccgagcctccctgacgatcaccgtcccctgctctggggcacccagtcccatcgaccgcccaagggctgaggagtgccggcgcactgcgtgggactggtgggcagctctgcctgccaccctggtgcaggatccactgggtgaagccagctgggctcctgagtctagtggggacttggaggacctttatgtctagctaagggattgtagatacaccaatcagcactctgtgtctagctcaaggtttgtaaatgcaccaatcagcaccctgtgtctagcgcaaggtttgtgaatgcaccaattagcactctgtacctggctaatctggtggggacttggagaacctttatgtctagctatgggattgtaaacacaccaatcagcactctgtgtctagctcaaggtttgtaaatgcaccaatcagcactctgtatgtggctaatctggtggggacttggagaacttttatgtctagctaggggattataaatgcaccaatcaggactctgtgtctagctcagggattgtaaacacaccaatcagcaccctgtcaaaccagaccaatcagctctctgtaaaatggaccaatcagcaggatgtgggtggagccagataagggaataaaagcaggctgcctgagccaacagtggcaatccactccggtctctttcgacagtgtggaagctttgttctttcgctctttgcgataaatattgctgctgcttactctttgggttcacactgcctttatgagctgaaacactcaccccaagggtatgcagcttcattcctgaggccagcgagaccatgaacccaccaggaagaatgaacaagcccagacaggaggatctagtaactccagacatgtggccttaagagctgtaacactcactgcgaaggtctgcaatttcactcttgaagccagtgagaccacgaacccaccagaaggaagaaactctgaacacgtccgaacatcagaaggaacaaactccggacacaccacctttaagacctgtaacactcaccgtgagggtccgcaasttcattcttgaagtcagtgagascgagacctcaccaattccgaacacatcatgacctaatcaccacctaaggccccgcttattaataccataacatcggagatgaagcttccacatttgaattttgggtagacacatttagatcatagcggtgcggaaacccaatcctaaagcagatggcagctgtctgtgaaagacctggctgtgagtgccaagaaggacatttgagatacatgagaagtagggtaaagactggcaccagggcccgtgtgatatgtgtgagacgtgtaaagccatgggtcttgctgcaccaaggagtccaatcctagaattagcatcggactcatctcacccccaaaacattaagatgcgccagggaagctgacacttttttctaagtggaattgtacatggaacactgccccttagaggggaggacagcagaggagttccgggagaggtgggtgggggctgggtgtggttccttggcatctactcctcagagttcactgctgtcagatccacagaccacagcatttgccagaaggatttgtgacrtgtacaaatatcctgcctccttcagtaccaagagctcaggaaatctttttttcatttttttcttggtcaaaagtgttttattattttttaaagagcttattttattccaggatcatatgaaaatgaattattttctttttataagattattcttgctctcaagaatcacactgtttctttttttttctttttctttttctttttttttttttttggagagggagtttggctctatcgcctaggctgaagtgcagtggcgatctcagcttactgcaagctccacctcccgggttcacgccattctcctgcctcagcctccccagtagctgggactataggcgccggccacctcgcccggctaattttgtgtgtgtgtgtgtgtgtgtgtgtgtatttttagtagagacggggttttaccatgttagccaggatggtctcgatctcctgacctcgtgatccacccgcctcagcctcccaaagtgctgggattacaggcgtgattacaccacgcctggccactctgtttctttttattgtttctaaaacatttaatgagcagaaggtgaagatcagttattcactgaatggtgaacataaatttccagagaggccatgggccattttgaaagctatttttgaatcctcttttgaaaatataatactgtgtgtaattttttgtggatacggttacttttggttttgagtaagtataagtttatttgtcactcataatcacagggatgtgtaactgcctcggctttatttatttatttattttgagacggagtctttctctgtcacccasgctggagtgcagtggtgcgatctcggcttgctgcagcgtccacctccaagattcaagtgattctcctgcctcagcctcccgagtagctgggattacaggtgcatgccaccatgcctggttgtatatttggtagagattgggtctcaccatgttagccaggccggtctcaaactcctgaccacatgtgatctgcttcagcctcccaaagtactgggattacagatgtgagccatcgtgcccagccctgcctccgctccttaaaagaatagctcatatttcaccaattaagtaacttgtattcagtatatgtacctattttatgatagcttcactctatattaaaaatagacaaattaacaaaaaattcttaatttctttcctctttctactcttgggtttcaggagatcaaaccgcatgattccttcccaaaaacttgcattctctgtctttgtcttyctttgcccgaaaaggttgcccctttcctgtgggcttggcttttccttcttctgcatgttcagctgtcattcctctgctaaatatttatcaactttcatattcatgtcagcctttaaagaccttgcatcgacaccaccccstcacctttcctgagtgtttagtaggcccaggagcaactttaattgctgtaaaacagtgattgttgaccatttcatgtaagaccatttcccaaatctagtagaatctatgaacctccttttgcaggaagatacagcaaagagagaaaaatagacccaaatctgtgtgtattttcagaagactcacagattcctgggtgccccctattccttcactgatgtagtgtctcttcctcgctggcatctcagacataggaaaagggtgcttctctcccatatgccttcaaatggctgctctcttggccaaaaagcagcccccagatttgtgactaccatgcgctcttagtcaaggaccagtccttttctcctatcccatttggaggcagtgactttgttctttacgtcacagaagggtactgagctgctcaaacatagctgggcctctggaggaccagcgtcttgtcttcatctctagtctctgctgctttctgttcagcgttttattcccttctccctcagatctcctatctccttacttatgcatatggtgcactgatgaaggctctctcctagctcccaggtttacatagtcttttatggtaaagctagcacaagggttttgagtatcacattttttttctaaacaatacttttataagggtattgtacaattagaccaagtcctgttgtttgactctaaatgccagttttagagccttgctacccctggtcattttcattgcacagtatttctgcttttctagagaacatattagttgaatgacaggttccaagagtatgtactccttggttgcaaataaattgtctaatttatctttgaatccccagagttcagtccagggcctagcacaaagcagctgctctctagatatttcattaggggaagtgggacatgcttgggtgagactcattttaattttccaagaggctttgatttgaaaattattctttgcttgaacacctttgacaagacaaattttcttaggtgaaaactagatttttacacttattcctaccaatttattttttcatcaactattgagtggcatcaatgaactatgatgtattataatcttttgtacaaaggaatgagaagttacaacagagaacaacacatttgattcttacatgaccttaaccccaatttcaaaaagttaaaaatgcacacacttaaccaatcaaaactcattctgtcaacactatagacctgcaacacagaagacacacatgcctgagcaaataaaaagtgacaaggccatattaaaaataaggtggtcagtcaattatcctccaaggtccatttcttagaaggcgtgcagctctatttgtytagcaaaaacagagtgcaaaataatttaacgccttaaagtatgacattaatttaacatcagttgtgtagacagtggtgagtcttagtaacgcgttttagaagttataaacaggttgagcatcaccaatccaaaaattcaaaattcctgaaatgctcaaaaatcaaaaatccaaaattttttagtactatcatgatgccacaagtggaaaattccatcctgaaytcatgtgaccagtttcagttaaaacaggtgcacaaaagcatcctcaagggaaaaaagacttccacagcccccttcagctgcaatatatcttttaaggtgtgtgtgaaacataaatgaatttggtgtttagagttgggttccattcccatgatatctcattatgtatgtgcatgtattcccaaatctgaaaagattctaaatctgaaacattgctgatcccaagctggataagggatactcacaacctgtatgtaaattcttcacttttagaatctgctttttattcctgcctttgaaaattgtttagtactatgatagattattttacaattatwaatattcaactgaagaaatctttaccattatattatcaaaatctaacacttacagaaataaagacattcagttgttcctcattatatgccatacaaaatcatagcaaatattttatagaaaactttatgctttatttcacttctaaattctattttaccaccagagtatacatctgaatgcaatttaatgcatttcgtctttaaatccccaaaatctgactaaactaaactaaattttcagttaacatcatgtatcaaaagtggcatgtggtacaatgcacacattttaagtgtacaatttgatgcctttgaacaatattcatacctctgtaatcattaccccagtgaagacaaagagcattgtcatcattccagaagcatagctcatggtctttgcagtctgtcttctcttccagacccttcccagcaaccacatattggattcctctcactgtacattcattttgtctcttctagaacttcacataaattgaatcacaccgtatgtattgttttaagcttattttgcttggaatgtttttggagttcacctatattgtgaagtgcacctgtagatcatatattttgttcattgtgagtggtattgtttgtatgaatatacaaatatttgtttactcttccatttgaagcagccatttgggttgtttcccgtatttatctcttctgaataactgcgatgaactcttacatgcacgtctttttgtgggcctatgattccatttttcttgaataaaaaacctaacagtataatttctaggtcacttagtaactctgtatttaactttataagaaactgccaaattgttacccaaagtggttgtaatattattcactcccactggcagtgtagaagactttatatttgcttaatttttttctcctgtctgttcttctggttggaaatattctattgatttttcttgctagttcacagactttctacygtcatcttcaatctcctcttatatatatcaagtgaaattttcattttgattattgtactagttctagaatttacatttttatgattcttaattttctttctacatttgtttaaatgttaattcaataagagcataccttctttaatttgttaaatacatgtataatagtggctttaatgtccttttctgataaattaaacatcacagccatcattcaggggttcattactttcctaagtgtgaattccaattttgcttccttctctgtctcgtaatttctaaatgcatatcaattactgtgattccgccttgcatttgcataggttttgctttatgcttcatttgggtggraatgtagaaaccccaggaatgttgcctaagctccgctgatgtggggtggctgaacttccaaatgctgttggccatgctaatcttggcagggcttggttttcagctctgttgagtagagtttatccttataaggatagaagttattctgttaagacttggcaagctgctgtctggctgctctctgggtattactgaggtgttacagccatcaccgtgttctgattcaacttcctgcagcagttgccctgtgtatacctcatgcagttcctcttgctcaggtgtcagccagccatccccaggactgtggggggccccaaggtaaatgtctgcccactccccaccgcaggtcccgccacctgttcccagctgcttcagctttccggaactgggatggcagcctcgagtgcagctgcaccttgctgtgctgggattctagtgccctgtgcagtgtgggcgagatttctcccgaagggaaactgaggccactgtcatgagtttccctcttctcaggctccccagtcttaggctgcttgttgtccagtgtttggaagctgtgggctcacacawgttgtcctcttttgtgattgtttataatgggaaaactagtctcctttccatcacaccatagccagaaacagaagcttacattcattctaaattatatttttcccctacaattttagctcctgagcaattgtttaaatgaaagatttttaccataattaactatgtgtcttcacaccggggcctgttgtggggtgggtggaggggggagggatagcattaggagatatatgtaatgctaaaagacgagttaatgggtgcagcacaccaacatggcacatgtatacatatgtaacaaacatgcacgttgtgcacatgtaccctagaacttaaagtataataataaaaaaaaaggcctctccctacttagacctgagtgttcacagcagctctctttatgtcctcctgcaatgcatttcttcttttctatggcacctaatattgttacccctgcagagctattttttctttagtaatattgcaggactttgcacttattaatattaaaatacttacagtacattgcaactatttatgtgtgcaacctccatattaaaatgtgaacattctggaggagtatggcttatctccttaaatgtctaacaatgcctgattcttagtatttgttaaacaagcagaaggattaatggatggatctcataagttttgttggtttagttttttgtttttgaggtattatatttcctgtggccttagattagggatttgaactatgtaaacaatttgcatttttaacatacctaaatagcaaaccagaaatttaaacaacagttccaaaatctttaaaagtaatagtataatttggtcataattgtaacatgaatataaacattagaactgattcaaaacccatttctagctaaggtactaaaattggaattgttagcaggcatgcttatattttatttcataagtacaagaatggtccgcagttggtaatcactttaagaacagcagtaaactaaaatgtgttcaactttttatatatctgcccaaacccttaataacatattttggttttgtatcagacctaatgtatatatgggttcatttatgacagacgtgtgaagaccacagttgagtggctatggcagagacagccatcaaaatattcaaaaataaagtatagcaaataagtttacaggtttcaagtgcaaagtgactgtttagaggctaaaaatataagtaagtccttttttccttccatgaggaaaagcttgaaaattgcttccaacacaagatcttgtagcagggctgattggaaagaatatctggactacagtatgaatggtttatttgtttattattattattattaccgttatttttgagacggagtttcattcttgttgcccaggctggaatgcaatggtgcaatctcagctcacctcaacctttgcctcccacgttcaagcgtttctcctgccctcagcctcccgagtatctgggattacaggcatgcaccactatgcccggctaatttttgtatttttagtagagatggagtttctccatgttggtcaggctggtctggaactcccgacctcaggtgatccacctgccttggcctcccaaagtgctgggattacaggcatgagccactgcacccagcctgtttatttttaaatcccagattgatgtttctgtgcagccaggcattctcaggccacagtcattgctgagtcatgtggagacacaggcgctctgcactctggtcgggaaggcctctggggacagtgggtcttcccacgtccctgtgctgcactaccccatccagcagcacatatggttcctgcagccagaggcctgcaaccaggtatctggcgttggcgtgtggaaagagaaaaaactcagtttagccatccatccaaatcacacatcatacacacatgaatctgcagtcaaattcccattccccgtctagcccatccctttcttctcgcaggcataggtggactgctgaagctgcgttccctgctgtagctgtgtttattgccgatctatagaaccgatttatttctcagccaagtgcagctaagatccattagtgtcagtacctgtagcaagagaggygtaagtagtcataaattagctataatcttagataatcttcctttagaaaaacaagaaaggagcagtggggagctgtgggattgtcctgtgacagtcccattactcagtggagttctgctggcagagttgggggtggtgggctaactgccctgagagtaaattggagttaagtatgggtctcattaggcagtaatagattttttaaagttttggaaagctcttttatcctctgccaaaacaaaagcaagcaagcaagaaggaacatagccatttatttcctgtttttctatgtatctcttctcagtgtccagtcttctactgctttttcagttcctctataacatttcgtatcctctttgaaaccaaattatatcatcttttaatctttctagatcctctctttcacagcttcaccctttatttttcaattcaatatatacttaaaaaatattggttgtttcttttgtctcataatttgaattcccttttttctaatctctttaactccctaaaccattttttaaaaatattttcttttagaatgacttacctcttctcttgcattgaatgcattgatatctacatttcacagacatttattaagtcactgttataaaccagaatttgagggagaggcagcacaagtgaattgaacaccatacctgcatcgatgatttctggagggtgagtgagcaggtgatagttctgaattggttgagccccatcccagtcctctgagagctcttttgttgagtgtgttcacccagcatctggaatagtgtctacaaagtcaaggagggcctgatgcttatatgcacacacactttatgcacacttgtgactgtgtgaataccctgcaggccctctctagggtcttgggagtggcccttgtggttagggctctgcagagtcatcttcacttgcttcctgggaactctgcctctgggtagttactcagcaaatacagacccatgacacatcctttcccttcctttgagcaggttatatctcatggggttgctgaatgtgctcatctttgtgaaatgtgaggcagatgtgggatgaccattgtaccacatgtctaggacagtccctatctacacttggggtcttccaaggtgaataaatacaccttgtattccacaatcaagtgcctttgttggatcctgggcagagcagagacttctaggcctatgtggccacaggaccagcgctatgtaccccagggcatttttgagaataaaagagggcactatgaatgctagttagaktgaacatccttcaggtcaagatgccactttaacacagggtttggcaaaccacagcatgcaggctggccgttgttcttatgaatagtttgttacatagtcagacacatttacttaacattccctatgtcccactacctggcagagtggaatagttggaacaaagattgtatggcttgaaaagtccaagggtatactagccaccctttaagaatagtttgccgatgcctactgttacagaatcaaagcacgattgaagaaggatattctttgatgagtttttctaatatgtctcaggacttaggaatgatactgttcctcttcagagttataattttctcacctcartatgagacagtcaaatcaaaaaagtccccaaatggaagccatatttttcttgttaacctcttaggttttatggatgggatagctttactctaatagtaataatatttccttcatatttggctggcgtttgttgcacaaaaaggagtgttttgtgacatatatcacctctcattctgtaagacaatttattacatgaagtgctattttttaaaataattattcatgctccaacatatatagaatagtttgaggcaaatctcttctgtatatgccctgggcacattcacacttttcattaacacttttgttatctcatgagctggtgttaactttcccaaggacacggagttgtcaactggagaatgcaggttttaatctgaatctatatgattccaaagttgatgcttttagccactatattatttcctgcgactgctgtaatgaattaccataaaatagatgccttaaaaaaagacagatttaatgtcttgtacttcagaggtcaggagtcggaaattggtcttgctgggctaaaatcagggctgtgccctttcaggaggcttcatgggatgatttgtttccctgtctttcccccttctagaggctgcccacactccttcgctggggccccttcttttcactctcctattcccttttccacttttaagaactcttgtgattacattgggcccacccagataatgcacaatggtcttcccctcttgatatcctttggtgaatcacattggcaaaatctcttttgccacgtaaggtgacatattcacaggttccaaagattaggccatggacatctttgaagggtggtgcactgctattacgcaactgccaatgtttgtttttattttctgttttgcttcagctttagcatagaaggagactatgagaaacagcataacccagcacttggcaatacagcaataaaggctctgatgtcagaccatggtgttacacgtgctctcttcatttccttctcactgtggagccttttgtacttgttcttagtctcatacttctcatcccgaatatgacgatcattgtatgtgtctcatcagtttactgagaagatgaaataatttaaagtatgtcaagaacttagcagactgcctggatgctaagtctatgcacacatctgagtgccatgtgtaagtgaatctgcattggtctccaattatggaaatttaggaaattaaaattcaggaaaattaaagaaaaaacattctctaagtaaaggtggaaacctgtctttctataggtagcaattctttccttttcatttcagagcggcatgacattcacataaaatgtatacttcagaatgaaaacacaggagactggctttaaattaagtaaaattcatggtcagtgacatgtaactcagtattttcttttgctcaggaaatatattttcaaatggctgtaagtgagactactcccaatagtgtactctctaatcttctctttacattaaaattgaggaaytttgatattaatttttatgccaatcaatttctcctaacctcacaatagaaatggcaccactgttgctgttgaaaatctgtgctttcaagacaggtatgccctctctcaccactcctattcaacatagtgttggaagttctggccagggcaattaggcaggagaaggaaataaagggtattcaattaggaaaagaggaagtcaaattgttcctgtttgcagatgacatgattgtatatctagaaaaccccattgtctcagcccaaaatatccttaagctgataagcaacttcagtgaagtctcaggatacaaaatcaatgtacaaaaatcacaaacattcttgtacaccaataacagacaaacagagagccaaatcatgagtgaactcccattcacaattgcttcaaagagaataaaatacctagaaatccaacttacaagggacgtgaaggacctcttcaaggagaactataaaccactgctcaatgaaataaaagaggatacaaagaaatggaagaacattccatgctcatggataggaagaatcaatatcgtgaaaatggccatactgctcaaggtaatttatagattcaacgccatccccatcaagctaccaatgactttcttcacagaagtggaaaaaactattttaaagttcatatggaaccaaaaaagagcccacatcaccaagtcaatcctaagccaaaagaacaaagctggaggcatcacactacctgacttcaaactatactacaaggccacagtaaccaaaacagcatggtactggtaccaaaacagagatatagatcaatggaacagaacagagcccttagaaataacgtcacatatctacaactatctgatctttgacaagcctgagaaaaacaagcaatggggaaaggattccctatttcataaatggtgctgggaaaactggctagtcatatgtagaaagctgaaagtggatcccttccttacaccttatacaaaaattaattcaagatggattaaagacttaaacattagacctaaaaccataaaaatcctagaagaaaacctaggcattaccattcaggacataggcatgggcaaggacttcatgtctaaaacaccaaaagcaatggcaacaaaagccaaaattgacaaatgggatctaattaaactaaagagcttctgcacagcaaaagaaactaccatcagagtgaacaggcaacatacaaaatgggagaaaattttcgcaacctgctcatctgacagagggccaatatccagaatctacaatgaactcaaatttacaagaaaaaaacaaacaaccccatcaaaaagtgggtgaaggacacgaacagacacttctcaaaagaagacatttatgtagccaaaaaacacatgaaaaaatgctcaccatcacttgccatcagagaaatgcaaatcaaaaccacaatgagataccatctcacaccagttagaatgacgatcattaaaaagtcaggaaacaacaggtgctggagaggatgtggagaaataggaacacttttacactgttggtgggactgtaaactagttcaaccattgtggaagtcagtgtggcaattcctcagggatctagaactagaaataccatttgacccagccatcccattactgggtatatacccaaaggactataaatcgtgctgctataaagacacacgcacacatatgtttattgcggcactattcacaatatcaaagacttggaaccaacccaaatgtccaacatagactggattaagaaaatgtggcacatatacaccatggaatactatgcagccataacaaatgatgagttcatgtcctttgtaaggacatggatgaaattggaaatcatcattctcagtaaactatcgcaaggacaaaaaaccaaacaccgcatgttctcactcataggtgggaattgaacagtgagaacacatggacacaggaaggggaacatcacactctggggactgttgtggggtcggaggaggggggagggatagcattaggacatatacctaatgctaaatgacgagttaatgggtgcagcacaccagcatggcacatgtatacatatgtaactaacctgcacattgtgcacatgtaccctaaaacttaaagtataataataataaaataaaaaaaaaagaaaatctgtgctttatgccatttagtgaggtcggcttgtcacctcattaaacaaatagcgatcctcagagaacctgaatccacatcacttcttggctagaaatgaggaaagcagtcaatgtgctttatgtttttgtgtgaagagagccataactgttatcatgcaaatttatagaatacccagaaaatattttaaaggctttataaattataataaagatatttatgaattaatatttgtacttatttcatccagaattaatatggagaaggcggagaatttcagaaaatgtgctgaaaatactacctaggtgcttttttgggttcctagtaattaactttgtgatcttaggcaaattgcatgatctatctgagtttccacttccctgggcatattattcattggttgccacaggaaacttactgaatgcttttaaatggctctaaaatattctcctttgcaaatacttatgagcctaaggcagacaaaaactagtttgaatcagtttagaatgtttttaaagagtgaattgagtcaacatttactttcattttgcataatgccagatgttctttgcaacatttggatagtttggcctatatcctcattttctcattaacaatgattggtacttcataacattttttagctagaatggaatttttttttggtggggggggcatggcttccatagccagtgaagtcattagcttattttgtatttttaattacctgaaataataattgaaaatgaattaaaatatataamcatttgtgctatatataatattaaaaccttttctttgtttttcttgcctgttccattatggggaaatgtgacataaaagctactttaaacagagaatgatgtgttttataaggcatttgactaatagcctcttttcactggcagtttgagaatttcttggcaaataataagttcagtaaaatgagcttcctttttgctaaaaaatacatagaaccattgaacaaaaagtaaaactataaagaatggctttaaacataaagaagctcaaacaaatgggcaattcttatatgtcacaaaggacaaggaaacttaaaagccagggagaaatcaggaatgaatgtgctttcttggcccatgattatcagtcatagacattgctctgagggatcagaagttgaggttttagtacccacacagggtaaggggatacagaatccacctagtcagaggcctgaaacagagttctctgcagaaagcctgaaatcctgcctcatctctgcaaggatgaagggaactagaaaatgccttcccatcaggaaagaggaagcagcaatatggtttctcaagtaaacatcagggaccgaggctgaaatgaaacaggaaaatttttgaaattcgaatcccagcctgtgttacacaggaaaagaatctgaatttactcaaacatcatggtgctggaaagaaaagaagataaattaacatgaaaaacagcccaggggcacatgaaacccctgaaatcctcgcacaagcacatgtcaaatcactctctaggcattcttttacgacctggtgcatacagacaatcacgggaatgacaaaccaaactcccaagaagttctctccttctcacacatgcaagttaaaattcatttcagcaaatatgtagctgcaagatagtcagcaatgagaataaatgaaaagcaacaaaacaaaacaaaattaaaatggaacttagggagattaaaacaataggagagactctgtgcatttaacattaaattaagtaagagaatgaatagaaaccatgttaaaaggaaaaggtaaaaatacaggtatttgaaaaactgaatttcaagacatgatatatataatttaaattaagatctcagtagctagtgaaacagcatactagaaatagctgaattaaaaaaatagtgaactggaagataaatctgaagaattcactcagtgtgtagtacagacagatgagaataataaataataagggagatttagagatagggagaaaagattgaaaacatcaaatatttatagaagttccaagaggtagaaaacaggaatgagagagagagacccagtttgaagggttagcaatagaagagttataaaattgaagaaagacttgagtcctcacatttaatgaacagaaccagtaccaatgtactcatctgcagaacatctcacttaggaagtagaatgtatgtatttgaaacctgtatcagtctagatatgcgagattatggtaatcaacaaccaaaaatctcacaggatgagcatagcagatatttttcacttacattaagtgtctaactcargttggaaagaataaatagaaaagcgaaagttaataaagtaaaaagttgaaaaaaagactgattaatatattcccaaactgaaagttaagttacaaaaacataaaaaaaccagatttctaagaagttactgtttgtgtttttataaagatagcttgaaaataatagtaattgaataattttctatttggtcttcgaataataagaaagccaatatcaaaacagagcctacatcaatttgaaatcattgaaaaattacttttaatagtttctgagttctagctagacaaaatatttcaaattttaaagagcacattatacagtattatggaatatataaaaagatgataacctacttgatttattagctgaaattagcatgcctctggtataaaccttaagaaaggatctgtaatgttaaccctgaagtcattttttayagggaataacattaaaaaatgcttgtcagtcaaatcatgaatagtttaagaatagtgcaacatgattaaggaggaataattaatataagtccagaatataaaactgagttagtatcaatatagggcattatattagaatatacagttataaaacccattcagtcatctcagagtataccaaaatgacatttggtaaaacttgaaaacatatttaaggtgaaaataaaaacaacaaaaacatttttagcggttttgaaatagaaacatctttttaccgtaatattcatgtattcattcaattagtaattacgttaattcataaatatgtattatatctactttattccacctatttccttaataaaaggtatgcaactgatactgtagtgaatgatgaagcactcactggcttagaaccggcaaaaatctagcaattgtgagaccagtctcccctactgcatctgtgacaaacactactaaactctctcaggattttttcctaccgaacatagaggcaatctctgacttcttctagacatggctctcatgacagccagcagttactctacttgatgggacctggcatacaaaatgagacctccttatagcccctcactggagcatgcccacctggaaacaaaacatggctctattaccatagttaacattgcttttaaatttcagtgcagcaggccctattgggacttatgagctggagaaacgaaatgaagactgctcatttttataactgcataattttcatcagtttagaatgttgtctaaaagggagaattgtaagagtgggtggtaattatgagatctatgcagtggcatggtttgttgtggacagttgaggaggtcttaactataggcttcctttgctgaatgaaggataagcttagttcatctctgactgtgaaagagtagaacagtgggaaatcagatttgagtggagaagctctcacatcgtaatggacttcataagactggaaaaaaagtcagagcatcaagccaaaatagttttgcagttttgaggacataaatgaaatttataaatcaagtgtatacagttgattaaatagaataatagaaataaaatgcttgtcacttggctgacatgtagaaaagactctttctttttttttttttcaagatgaagtcttgctctgtcatctgtcactcaggctggagtgcagtggtgctatcttggctcactacaacctccacctcctgggttcaagcaatttttctgcctcagcctccctagtagctgggactacaggtgcrtgccaccatgcttggctaatttttgtatttttagtagagacgacgtttccatctatcatctatttatccacttaactacctatatatatattatctatttctattatctctctttatctcttatctatctatatcatctctacctctctttatcagtcatctatcacttgcttctaattctctgtcatctctctgtatctatctttatctctttttctatcagtcatctatctatcttactactgccagtatcatgacataggggtgtgatttctgaagcttagaataaatcacctggccgggcacagtggctcacgcctgtaatcccagcactttgggaggccgaggcaggcggatcacgaggtcaggagttcgagaccagcctggccgatatggtgaaaccccatctctactaaaaatacaaaaattagccgggcatggtggcacgtgcctgtagtcccagctactccggaggctgaggcagaagaattgcttgaacctgggaggcagaggttgtggtgagctgagatcacgccactgcactctagcctgggtgacagagcaagagtcttatgtcaaaaaaaaaaaagaatgaatcacccaacatttctgttaaatgtcttgaattccaccaatggagagctattcttttattcgttatctgcttttatatcaataccatggtctattagtccattttcatgctgcttgataaacacatactggagattgggtaatttataaagaaaaagaggtttaatgaacttacagttccactcggctgggaggcctcacaatcatggtggaaggtgaaaggcatgtcttacctggtggcaggcaagagagaatgagagccaagtgaaaggagaaaccccttataaaaccattagctcttgtgagacttactcagtaccaggagaacagtatggggaaaccaccctatgattcagttatcttccaccagatcccctccacaacacatgggaattatgggagctacaattcaagatgagatttgggcaaggacacagccaaaccatatcacatggtataaaaacgtagtttatgttttaaatatctgtttatgccttctgactggcctatgctctttaaatcaggggctgttaattagtcgttttttagtctagattggtggctagaaaactcagggaatccttaggaatatgtggattgaatggaaagttaatctttaatttctcaatcagaaattaaaagcatgatttattactgtagattacttaccccagaatgtatgctaactaatcttatgtagtgtgtaaacataacatttaatgacattgtcctacacagtggaaagtgttttttttttttcctttttagctatttttctgcttctgtgrttatgatgtagggagtctcacctggagactgtgtgtctttaacacttgatgtttatttagtcaatcttttaaataaaaggggaatatgtctcaggcccaggatttcaaagggttactgtatgtaaccagtggagaaagcaaatttctccactggagttaaaaaatgatataattgttaatagctgtcatgctgtaagtattgttcaaacatgctattgttcaatacatgtgaatttttattggatatggacctgtctcttttcttatgtggaagtctatctcagtctcaatgactgcctggacttatctctgtcttattgttgatgtctctgccttctttgattttattctgtttcttaattttttccttatatttatatcccttctttcctttttcctctaatcaaaaaacaaagtatagatgattatttttattactagacataattacagagttctatattctgtactctgcttttgaaaatttgatgactatcacattttagttctatgtaaaatcttatataaatagcttagattattttcctcctttaaagtagtagtagaaagaaaagttcctcctcccataaaagcaaaaaatgaatagtattatatacttgtttaaaaacaaaagtcgcttgagttatttttcccatttgtttacttttctgtgctatttctgttacagagatgtttgttaacatagagctttatatatagttttctaaaatgcatacgtttttaattgtagaagaatttatttttacaaaaatgtgatgtccttaagatttttgaggaaattagatatctagagtcccgagatagcttttaataaaaagtattctgggaaaattttctttcaagtaaagaaacaatttttctgtctggtgttgttaatgacaaattaaccataagattttttttttttgtcattcacctttatttcagtgctggtaaccataagattattttgtaccatgtgtctgatctgactaatcatgctagtggggtaggatgttttcattgttttaatttctctgatgtaaaatgtcatttacttcccttaaattgatgcagtcatcctgaggcagaggaaattttgttctgtgtgagagtacacaagggcattttgccttttttgccaaaggacatgtttcaaatatattttttctctaaaagctactaaatgatcatatttgctctgaaaatccagatgtctctcagaaagcttttccacaaggacactttatcacaaagcacctttcctttgtgttttggggaaggatttttatttgtttcattaacaccatacattgctgcatatctatcttgcactctctcaatcaggtgagcatgtataaccctgaaaagattccatacaggacctctgcccttgtgtctctgtgaatgatccagctgaatgaaagttgttattattattatccttccttctaaagccaactttaagtcaaactgtcattatgaaattagatatggcttgacactgtggtctctgtggcaagaaatagttcatttcaaggtctgcaaatcttttctttcaactctctgtatatcaaaataccgacaaaagcaccactttttttaaaatatagctagactgtttactcttattattccatgtgtgtttttggtttgcaatcatggaaaaggttaaaaggtaaatttaaacacagttagatggtacattaacaaagccaggagattttatgatggcagtttgcagccctgctttgggcggtactctctcatgttgtctgcatttaggggaattctggccaaagttaccagcgccctttgtatttgctgctgcacacaacagaaaggggcttggtgtgtattgtcattctcactttcagggacaatgccctcggatgccatctcagattacagatgtctttgctgtcataaaaccatgccgctttgtattggattatcattttaagrtatggaacaaatggtttgggggcgaaagttgacaagtgaaatgacataccaaagctattaatacagaagctgctttataatcttactaatgaccaattataaccacaaaagaagagctacaatgtctacgattgaaaaagttaaaaaaaatagaattgacattctccagagtaatgcagatgaattaataagaaatgttttgagagcttatggatctcagacttccctctaaggaaagtggagaggatttatttttccaaacataggctctacatgattaataagttacttatataggatatgcacgaagactcccaacatttcttggagctgctgtggtgagccatggtaaagtaatatggaacaataaggataggaatagttaatgtttagctgaattatttaagacatgagaaaaagatcaatgatgaagaactgaaattaacaaagccaggattatactctctgggaaagttcaatgttctaacttctaaaacttctaagtactatttttttctggactcttatagttcatagacataaatctgaccctatgtaactttctgatttccattattattatttctcatattctgcataatttaattctaaccattcagagatcaatatatctttttttttaacttattttaaagaagtaatgcaggggtgtatgataagtctctgtacctttcactcagttttgctgtgaacctaaaactgctgtacaaaatcaagcctattaaaaaattaattgaatggtctcttcaaagatacattaaaattacattatactaaaaataagcaggtgtaaggtttaggacaatagtctcatttttggcaggcaaactgttttaaaaattaggagtgaatttagcataaagtcaatggaaggtcataattatattagttttctaggctgttgtaacaacagaccacacactgggtggcttaagacatcagaagtttatcatcccacagttctggagtctggaagtctggaatcaaggtgtcagcagggccacgcttcctcaggaccttggaggagagaatcctttgcttttcctagtttctggtggtttcccggcaacccttggtttccctggcttgcagctgcagtgcctcaktccctgcctctgctgtaggacagcattctcactctcggtctttgttcaaactgcccttttaaagataaggacaccatggcccggagcggtggctcacacacgtaatcccagcactttgggaggccaaggcgggcagatcacaaggtcaggagatcgagaccatcctgggttaacatggtgaaaccccgtctctgcacatgtatacatatgtaacaaacctgcacgttcttgcacatgtaccctaaaacttaaagtataataataataaaaaaattcactattgttatgaaagttaaagtcagcagtagccataatttagcagttaacctgtcattagtgtttctatttttcttattaaatcatatcttttgggcctctggtcaaaaaaaaaaaattagctgggcgtggggacgggtgcctatagtcccagctactcgggaggctgagacaggagaatggcatgaacccgggaggtggagctttcagtagccgagattgcaccactgcactctagcctgggcgacagagtgagactctgtctcaaaaataaataaataaataaataaataaataaataaagacaccagtcatattggatcagggtccaccctaatgacctaatcttaacttgatcacatcagcaaagatcctacctccaaatagtattaccatattagcagatactggggggcagtacttccccatgttaatatcttttcatgggaacacaactcaactcatagcaataattaaaatttagttcttacctaacaaaatattgtttacttattttggaggttggtgtagccttggacaaaatttttttttttactcattttattggaaacacaggataagacacagaacaataaagagaaacaaaatgctttggcaaaagactctagaagacctaagtgggaaagaagagtttcagaaaaagttttgacatatgctcttcaatcaaacctagtgttccgtttataaatgtaatttgggtggttccaaaggcccatggagtcatttagggaatgcaaaagaaggaacactatctaacttactttctcaggccagtaacattttgatattaaaataaacaataacagtacgaggcaaggaaatttacaagacaacatctcatataaatgtatataaaaattataaacaaagcattgaaaactcaagttgaatgccatatatacatacatatataacatgatcataataggttcgtttcagtaatataattagtccaagatttttaaagtgttgatataatttaggacataagccgattaaaaagaaaaaggtgattatttcagtattggcagaaaaaaacattccatgtaaaatgcaacatttctctagaatttaagaaaggctgttagaattctaggaaaaatgaaacatcctaactaaataaagaacatctcaaaaatacactgtaagcattaattgttagaagcattccatttaaaaacatgaatagacataaatggcagcaacttcaaaattgtattgaaaagtacaatcaagacaataacataagaaaaagataaagatcagaaaggataaaactgccatattacttttttttgcaaatactctatgtagtaaatgggaatgaatataaagaaaaattgctcttccaaagagaagaaaaggtaaagaagtctaacaagttgtgcattgtgttgtaatgataattagaagacttacagatagttattaaagagtggagacaacraacattctcaggtgtagaaagattcagtaatattgataggtcagtacttcccacaaatgatatacttattgtagtgccaatgaagagcttagtagtgcttctttgtggcatcaacagctgattttaaaattaaactggtaaagctgatggccaagaggaacatggtagggtggcttgatgttccagttagcaacccttcctataaagcaaacttgtccaacctgcagcttgtgggaggcacgcagcccaggatggctttgactgtggtcccatacaaattcatagactttcttaaaatattatgagtttttttgttatttttttttttagctcgtcagctattcttagtgttagtgtattttatgtgtggcccaagacacttcttcttttttcaatgtggcccagggaagccaagagattggataccctgatataaagcttttagtaattaagacaatagaatagaatagaaagccacaagaaaaagggctcatatatggaaatatcctatttgaaagagctgcaagaaacattagtgagaagtgaggacatattcagtaagtggtgcggtaccaagtggctacccttkgattaaaaatgagtatggattctgatctcatatcatatatgaaaatcaattccagatagatataggaattaaatctgagaggcaaaattttaacttcacaaaaaataaaagagaatatctctatggcattggggaaagaaagaaatttttagtaaggtacacaaaattgtaaaattgatataaaaattgataaaatgaccttaagattaagaaaatattttcatcagaatctaacataatgagaatgattaaaagcaccacaaatacaaggaatacattttgacatagatcacagtattagcattcagaatatatagataattaacagtaagaaaaaaaaacccaattaaaaaagggtaaaaagtataaatacacatttcagtaagaaaaaaactaaattttcaatcaacacgtagaagatattcaattgtataattaattaggaagatccagaatcataatgaaacaccatttcacacccctcagattaccaaaaattttttgaaaaagacatattttcaggttagccctaggaaaataattgtcccttacttctaaatctctcaccacagccttctccaaatctgtaagatcaacaaagagaacacaaaataacatgactcataccttcaattagtgagagacagaaaatggcatgagtttcaatggcaagtttgaaaataacaagttatcggagctgccactggaactccacgttcactggaagtttgtggattgggaaaaagaagggaaactaattaaaaaaatctccatggacaaaaaaatgggaaggacagaagaaaaaatgcagaaaaggctggggagtcctagcgctgtggcaagaggagcccttgaacccaggagcttgaagctacagtgagctgtgattgtgtgtccagaattggtgggttcttggtctcactgacttcaagaatgaagtcgcagaccctcgccgtgagtgttacagttcttaaaggtgatgtgtccagagtttgttccttctgatgttcgracatgttcggagtttcttccttctggtgggttcatagtcttgctggcttcaggagtgaagctgcagaccttcgcagtgagtgttacagctcttaaggccgcacgtgtggagttgttcgttcctcccgtcctgtcccagtgggatcctggtcttgctggcctcagcagtgaagttgcagatcttcacagtgagtgttacagctcataaagccagtgcacacccaaagagtgagcagcagcaagatttattgcaaagcgcaaaagaacaaatcttccacagagtggaatggtaccccagaggattgccactgctggctggggcagcctgctttttyacccttttctggccccacccacatcctgctgattggtccattttacagagagctgattggtctgttttgacagggtgctgattggtgagtttacaatccctgagctaggcacaaaagttctccaagtccycactagattagctagacagagcagtgactggtgcatttacaaaccttgagctagacacagggtgctgattggtgcatttacaaaccttgagctagacacagagtgctgattggtgtatttacaatcccttagctagacataaaggktctccaagtccccaccagattagctagatacagagtgctgattggtgcatttacagaccttgagctagacacagagtgctgattggtgtatttacaatcccttagctagacataaaggttctccaacgccccaccagattagctagatacagagtgctgattagtgcatttacaaaccttgagctagacacagagtgctaattggtgtatttacaatcccttagctagacataaaggttctccaagtccccactagactcaggagcccagctggcttcacccagtggataccgcacrgggctgcaggtggagctgcctgccagtcccctgctctgctcctgcactcctcagcccttgggcagttgatgggacctggtgctgtggagcaggagcaggcagtggcgctcctccgggaggctggggctgcgcaggagcccgcggtgtgggggaggctcaggcatggcgggctgcaggtcctcagccctgccccgcagggaggcagctgaggccccacgagaattcgagcgcagcgctggccagccagaactgctgggggacccggtgcaccctccgcagctgctggcccaggtgctaagcccctcactgcctgggacgggtggtgccggcgagctgctctcagtgtgtgccagctgagcccacgcccacccggaactcgcgctggcccgcaagcaccctgtgcagccccggttcctgcctgcacctctccctccacacctccctgcaagctgagggagccggctccggcctcgttcagctcagagaggggttcccacagtgcggcggcgggctgaaaggcccctcaagcrcggccagagtggcctctggccactgaggctgaggaggccgcgacagcgagtgagggctgccagggctgccagcacgctgtcacctctcaattgcaccactgcagtccagcatgggcgagaaagtgagaccctgtctcttaaaaagaaaaaaaaaatcccctagaaggaaaaactccagcaccaagtactaagttgtcaagtgaaattctggaaacctggaagttatcaacaccatttacaaatctgagagtgtccagaaatggctttggctttktgtgtgtgtgtgtgtgtgtgtgtgtgtgtgtgtgtgtgtgtgtaaagggtagagtgccacttcagatttgatggtgacattaaagcagaatgaaatgaaattaaggatgctctagcacttaaagagaaacaaggctgggcgcggtggctcacgcctgtaactcagcactttgggaggctgaggagggtggatcaggaggtcaggagatcgagaccatcctggctaacacggtgaaaccccgtctctactaaaaatacaaaaaattagccgggcattgtggcgggcgcctgtagtcccagctactcgggaggctgaggcaggagaatggcgtgaacccgggaggtggagcttgcagtgaactgagatcctgccactgcactccagcctgggggacagagtaagactccgtataaaaaaaaaaaagagagagagagagaagagaagcaaaacatgttaactctcacttctccccatcaccaccagaacagacatcaaaaagactgcacttccctgtagtgaaagaagagtatgctacccaaccagaaattcgtttcgtgaaatgcataggaattaagagagagagagagatgtatttcaaataaagctatgtaacaagaaracagaaatgcaaatcaaaacatttcagaggaaaaatctctcagaaaaagaattgaaacaggaggaaacaataacacaacattcaaaccagaattaaacagcactcaaacattcaagcaggcacttggaaatctaaaaagtccatctattatcagaaaccaagaaggagaaagtggggaagggcagcagtgatgagagttgactaacaaaataaagtaaaatggaataagttacaatgtgtcgaggaataatatgcctgtctgttccaggctgtacagctctccaggtgacattgagaattttgatatgcttcttgtggatgtatgaattgtacatccattttggatagcagtttggcattgtcttttaacattgaagatatacatatggatatctatcatagagtaattccgtgtactcattatgggaatatgaatcatacatcaatttcatatagcagtttggcattaactattaaaattgaagayactatactctgccctcagaattctagctcttgcacaacgtaatctagagcagggatctgcaaaccacagccaagtggccaaatctgacctacttttctaattttgtaaataaagttttattggaacacaactatgtctgtttgtttatatgttgtctatggctgcttttatgcaaaacaggagttgggtagttgcaacagaacccacagttgtcccacaaagctgaaaatactggctctctggccctttatggtaaaaatttgctgacgcctagtctagagaaactcttgtgcatatgaagaaacatgtagagaatgttcatagtgtaaaagttgaaaacctcacaagtattcatcaccagtgtaactaaactaaattggaatggtttccaataatagactgtttactatacagcagagaaaatgaagaaagtacaaatatatgcaaccacacaattgcatcgccaagtaaactgttgagtgagaaaaaggaagtatgaatactatatttccatttgtgacaaggttaaaacatgcaaactaaactatttgtagtttagagaatcatatgtatgaaacaaaataaaacaagggacaagttaagttggtgtcacgtttatcattagagtagagagaaaaaaacaatcagagtggctcctactgggagtgtcaagcatatggacatattttctttctctgagtggtgagccaaggctgttggcttataatcaacatttgcattgtgcttttttgtttgtttgttgtttttaaaaattgcttcaaatcttaggtcaaatacttattgcctttttatcaagagaaaacttacctaacactttttatcttaycatctccgcaaattatgattttctattgactttttagcatacctagcatatacactgatgtggacatttctcaatgctgaattgttaattttctatgtatttctgaaggaattagctagttgcatttatacatgacataacacacacacacttgcatatatatatatatacagttatactccatatgtttagagaataattataaagaattgcacaggggacattgcatgaggcttggtgtcatatgtccttggttaggttatgactctgcctcctgcctatggggtgatccctgagggttccttcatttgagtgctttcccccatgaaatgagaatacagtaatcatatctacttttctttttttgtgtggataaaataatgcttggtggtcattcacataaggaatattttcaattccactttcagtctcaggtgtgcgctgtctgcctgtctctgttccaggttgtacggctctccaggtgacattgacctctggcccgcccttatggttgaagacctgattcctggtacaagagtgggaccaacacttatgtgcctgtttgttacccagtttcagcggctaagagatggagataggtgaatgattatctgttatacttattaaatatcacaaaagttgtttttgacccaaaatgtatatgtttaacattgtgattcatatttttatgatttaatgcatattgagtataatraatatcagatagcattaggtgacagaacttttgtaaccaccaatattatcagataacatttatttttgtaaatctttgtaagaagagaagaaacagaatttctcaaaaggcaatagaagttggcgattgagaggatgaaggctagatggactacgttgtgcttaaatctgagtctcaccacttacagctgtttaactttagacatgtatcactcagaaccaggttcctcatctgtaaagtgtgagtaacaattgtacctattccataggacgtctgcagccttcaatgatgttgagaaggaaggaactggtagcagccttgagattccctcccttcattctcatggaggaagacctgatgaccctagaccagatctccttgtaaaattacattatgagggcatttacgagtggaaagataactgggaactcttctctaaaatttcttggtttgtctaaaatgttcattgtaaataaatttaatcatgaaataatgggaaacagcaggctggagaatgtaagttagtcaygtaatctgtttactgttccaagactaaccaagaataaaaaccaagaaatacaaacctaagcagcctctcctgagtggacatgtgctcttctattgcttggaatcaagtatgttccagggcatggtatcttctgaatcattagtgaagcttagtgttgagtaagatctaggaatcttgtgaatctgtttgacaatataaccttttgtattatttcagagatgatgtatataagacttgaaacaaagcccagagcttagtttttaattaaagttacaataaaaattattctttactttaaatcccttccctttacaaattatagagaaagtagcaaaggatttaattccctttattgcacattggtaacaattaatagtatatttcattaattttttaaaatcatttttaacactgaatttcttgactcacataattgggttaatgtgctcaattggcaatagtttaaaaatatatgtagtcaaagactgaaaataattgaaaaaccttcagtttgggggttaagctgtcttccccatatatattagtttrccaggctgttgtaacaaagtcccatagcttggatagcttagacaacagaaatttgttattcttacaattctggaggttagatgctgatcaaggcatcagcagggttgattcctactggggcgtctcttctggcttgtatgtggcatcttctccctgtgtcttcacgtggtcttccctctgttatctatgtccacatttccttttcttataaggacaccagacatactgggttagggctcacacacgtgatctatttttaccttaaatacctatgtaaaggccctgtctccaaatagagtcaccttcgaaggtactggggcataggacttcaacatatacattttagggggacacagctcagtccataacatcaagatagtgrcaagaagtctttttgcctaccatcttaatttcctgctctatactcagcacaaaaaagtgcttggcatgtgatattcaaatatttactgaatgaatgaacccaaggattgactttgctgaatgtacccaaagattgactttaatagttctttcatttaaaattgattgtatcctttcatttaaaattgaatgtgcttattctagttagttgatggatataaccaaatagtatatattaattatcaaaagtgctattttctttttaggcaaacgtgttaatgttacattgctcagacagtttctaaggttagttcatggaatttaaatgcaacaatagggctaggtgcggtggctcacgcctgtaatcccaacagtttgggaggccgaggtgggcagatcacttgaggccaggagttcaagactagcctggccaacatggcgaatccccgtctctagtaacgatataaaaattaggcaggcatggtgacaggagcctgtaatcccagctacttgggaggctgaggcaggagagttgcgtgaactcgggaggtagaggttgcagtgagctgagatcatgccactgcactccaacctgggctacagagtgaatgagactccgtctcaaaaaataattaaaaattaaaaaaaatttaaaaatgtaataatggacttttcttttttggaggaaaaccttagaaaactttcctttgaatcattttgtagagcttgagtagaaagtgatagttcagaagaatgtgatttaagaatgttgtaaatattggagagaattaaaaggatactcagttggagaacaagcataattctttcagtatgcgtcttttatgttgagctcttcttggtgcattgtggctgtttgacatgcagctgagttctcaggccacagacccacgacaatgtttttttttttggttgactaccaggttctggtatgaaaaccctggagtatttaccccggcacaactcactcagctgaagcaggcgtccctgagccgggtgctttgtgacaatggtgacagcattcagcaagtgcaggctgatgtctttgtaaaggcagaatacccacaggattacctgaactgcagcgagatcccgaaggtggacctgcgagtgtggcaagactgctgtgcaggtcagtaataatgcaatgagcacgatctggattgatgtgcatgttctcatgcttgaattgttttcagtggtaaagattatgcgatttaaagaaagatacgcaaaaagccaacaacacagaactttccttttggaaatctgacagatgatgaaggggtggacaccaggaaaaaggctcccaacctgcccatcctcttccattccacactaaccttgttagaatggggactcttgctggcaaaactggcctctgccttcttactgcatttcagatttctgcaccaaagatcaaatgccaatcacttggtactgactatatctacttcttggggttcatctaacaaaagagaaatgaaagtttatagtgacttggctaacttaggctatccattcttcataagatgttgcagtagtgctcattggaagtacaaggaaattttgatagagtcaggaaaaactttccctaatgacacaacagaattggtgatatctacaacatcaccgtttacgaaccaaactttccctaaggtgcttctataagcatctgttttgtgctcacaatatccctttagaaatgtggatttctttctcctttgatgaaagtgtggctcaaaaatattagatgactttctcaaagtccaaagatgagtaagtggtggagccagggccagagaaaagatgtattgtttgttgaaacctagagatgaactgaggacttgatgattctggagcagaacatgctgacgtcttcacaggtgagcaggtgtctgtcacatggaggatatttgcagttcctctggacgccaatgacacaagggccaccatagcctcatgcttgctccgtgtagtggccatgggcctgggagttctgatgttctctgggactgaaatgatcattctcagtacctaagtagtactagagatttgttgtcaggggaggaaattgaaagccactgctagaagtgtgatagaacactggccgggtgcggaggctcacgcctgtaatcccagcactttgggaagccaaggtgggtggattgtttgaggtcaggagttcaagaccagcctggccaacatggcgaaaccccatctccactaaaaatacaaaaattagccaggcgtgatgatgggtacctgtaatcgtagctacttgggaggctaaggcaagagaatcgcttgaaccctggaggcggaggttgcagtgagcccagattgtgccattgcactccagcctgggtgacagagccagactcaatgacacctgagtcacggttgtctttttcactgtggtggtgctttatcggacacagcaaaaaggaatgtggtaccccggggagggtggcattctttcccttacctcaagttcttagtgattagatccaggaataatgaaatagtcccccctcttcagaatgttggaggagcagagagcaatatacaaaccatataaatggcaacttgtaacactcctttgcttcttctccaatgtccctgggatgggacatagggcctgctgagcagagggagagatagatggcatggcagggtgtgggctgtgatgaccagagcagtgccctgcaaggaagcaatggctccgtgtagaggccagggctgcgtgcccatactgacacataccatttctagctcttctcacctctgcccatgtgatatgtgattcagggaaacacctagctcatataattgtcctgagtctttcaaggtggttgttattatccctgatttacatatgaggaaaataaggctcctggaaactaaatccattttctaaggtcccacagctgacctgaaggcctcggctctttcctctgtgcgcaccgccacctggtagcacgtgtagggtaggtgcatggcacagagacagtgagcaggcccccaccaagggcagttcctctgctgccctccccccattgccattgttccatgttgaagactcggaggagggctcctctggttatttaaatggtaatgaatctgctgtgggcaatgtttgttatggaaaatgcaatgcaaggatgtaacagaccagaggagggttggggtcttgagtttgtgcagcgttcttatcaagatctgtggtcccaatcaataataagaatactctttctctgtgagtgtctttaaaaaatgtctgaaaattaataagccagcagtaaacatctactccttaactggatacaaacawacagtgtttttttttttttatggcactataaaaatgctcagaagtcatgtcagtagcaaaattacctaaagatatgaatatgcctgatgtagttccaatcctaatgtaatgtttgtaatgagaaccattacaaatggatacatgtgtatttttccgtgtactttctgactaacaagcgtggatttttcagaaaaattaaaagacagtttaaaatgagtggcttaacaaaaggtgtttagtaactgctccaaagtggaccactttcttatgggatgggcttcttacacttcccaattaacagaaacattgctctatgtagattagaggcctgctggaacattcagatctctgaggaactagtttctagactgtggctccgtagtttcaggtaggttatacattttaatggtctgagttaagtaaggcagttgagaagtgctggtattgactacattgagtccatccctgagacctgaagttgcgaatttcccaaacagagaaggtgtattaaaggacctagaaactatgtcactactcagtacacttgtctttgttgtgtgttcattcatgttgtattaatagatttcttccctctcctttgctaatctcactctcagactaaaataagtgatggtgtttaaatgatttatttatttatttttatttttattttttttgaaacagagttgtgctctgttgcctaggctggagtgcagtggtgcaatctcggctcactgcaacttctgcctcccaggttcaagtgattctcctgcctcagcctcctgagtagctgtgactacaggcccgcaccactgcgcccggctaatttttgtatttttagtagagacagggtttcaccatgttggccaggctggtcttgaactcctgatctcaagtgatctgcctgcctcagcctcccaaattgctgtgattacaggtgtgaaccaccatgcccagtggatttaattgttttaactggcattatcctagagtaaaatagagacctccgtttgggatgtaaatggccactccaagcagtcctagtggttcattttgttagaatgaaatgtatgattaaattgaccctcagccctttatgttgtttttaaagaataattttattttcaacagggctattttttttttcattttttgtttcccacgaataatagcttactggttaatactgataccagcatcttccaaatttaactacatttttttaaaatcctggagaaactcttctcctaaattcctaaacacattgaaatggactctgagtctgtttaaacagtgataatataaatgcagtcaagatttacatcattatatcttgttattctttgtaggtagaaggcatgagatctaaataatggagctgggatttctgtcacttagctgtaaggctatgggtttgtatgggtgatcaaactggaaaaagttggggtgttaaggacttggtttgtagttttcgtgtcatttattatgtttgatgaagaattttgttatccaccattttgttttgttttgttttgttttgagatggagttttgctcgttacccagcctggagtgcaatggcgtgatcttggatcttggctcactgcaacctctccctcccgggttcaaatgattctcctgcctcagcctcccaagtagctgggattacaggcctgcgccatcagacctggctaatttttgtatttttagtacagacgtggtttctccatgttgatcaggctggtctcaaactcctgacctcaggtgatccacccgtctcggcctcccagaatgctgggattacaggcatgagccactgcaccctgtggccctatccacagtttttaacccatgaatttcagtttctcttcaaactattctaaaacaacatggtgtttttgtttttctttttgcccttaactaaatccattgtcgtgcattttttttcataaatttcctcaagtcattctatgtatctgttatataagtaattcctttaaaatattgcttagtatttaatggataggattgtatataccaaaattcatgcagccatactttgcatatcagggcttatatgtccataggctaggttcttatagaattcccaaagtaaagttgctgaggtacaggatataggctttttaatgaaaaaaagtgttgtcagatttatttctaaaaagataaacatgacgattccacaaacaattatattaatacccactttatttccccaccagcaattggtaatatagcccttggttttttgatagtgcagtgagtaaaaacttaattatctcaagttcattttaattttcatttctctgttagtgtgtttaaacagctttttccatggtttttggttttggggattggctgtgtgcattgtgtgttcatagtctttgtcctttaatcaatctgtatgagctctctgcaaatgctgtgtgttaacaatggtgagggtgaacatcccaggcttgccactaaattgaaayggtttcatcatttacccagcagcaacatgcttgcttccttttatatgaatttttttttttttttttttttttttttgagacaagagtcttgctctgtcgcaaggctggagtgcagtggtgtgatctcggcttattgaaacctccacctcccaggtttaagcgattcccctgcctcagcctccaaagtagctgggactacaggtgcccaccaccacacccagctaatttttgtatttttagtagagaaggggtttcaccatgttgaccaggatggtcttgaactcctgaccttgtgatctgcctgcctcggcctcccaaagtgctgggattacaggtgtgagccaccacacccggtttatttgaatttttttatgcttaagaagatttctttcagtcccttggtcctctctgtaacaaagtagctgctgcatttcacctgtgctgctccttctccctgtgcactgcccactgtcaggtcctactgtacagagggctttctttaatttagttacttcatttactgttatttagagcttccctcttcaaattagccttatttatttttcccattatttgcatatgcattatatacataaatacgtaaaacgtatcttctatgtctgtatacatgtataggtgtgtacacatacagatgtgtacattgttaaaaaccttagacaaattaagtttaacagactttacttgacaaagggcagcctcctgagccagagcaggctcagagagactccagcacagccacgtggtggaagaagatttatggacagaaaaagagaagcaatgtacggaaaacagaagtgaggttcaggaacagccaaattggtcacagcttgggctttgccttatttgaacccaatttgaagagttggctgcctttgattggccaactgattatgaggctcagctgacacaggagttgattacagtctgtttgcacttcaagtcaggttcactatgtccagacatctttaggccaaacttaaaatatgtaaggaggcagctttgggctaagcttaatttagcaatttccctcttttggtcatcctctcaactttgggagatagaccaaaactttaggaattaatgtcactctgtcatcatcgtaaatgtcaagtaattttgtgtgttcatgagggttacagtaggggcaaccttcttttgttggaatctactgttcwcagggggagaaaatggtcactttaggacctatctccttccttaaagtttcagtttggttatgctgcttttagcataagtgcctccattttgcttttgtctggtttgttggggcctggtgcaggagctcagtccaaaacaatgatctcccataattttgtttaaaaacctcctctccctttttggtaaggttctcacttaggtgagcatgtgaccaatacttagggccttatcaccactctcagttaccatcattttgggttttctgtctcagcatatcactcacaggctacgatgttctcatgatcacatgtttctttgagtttttgtcattccagttgaagaaaggccatttgacattctacagatggctgcatgcaaacgtttaaaatttttgagagaatacaacgcagcagggagactactgttatgattatcaggaggataataccaagagcttggagtatgctccttacctggggtcccataaaccaaaccaaccaaataaaatcaaatagatcaaagaatgtgctaggtaaagaatctactcactttaaccaagcagtctattcattaattccttacaactgaatctctgtaatacctgatgtgatgtatttctccatgggtgacaagaagtgccaacaactacacagacacttctctgttaatcactaagtgatctagagcaattttattatttagcacaactttcaaaggagcatttaaagtctgttgtataactggctgggcctggtggctcaagcctgtaatcccagcactttgggaggccgaggtgggcagatcacttgaggccaggaatttgaggccaggctggccaacacagtaaaaccccatctctactaaaagtacaaaaattagctgggtgtggtgggtgcctgtaatcccagctacttgggaggctgaggcaagagaattgtttgaacccaggaggcagagatttcagtgagtcgagatcatgccactgcactccaacctgggctacagagcgagacttcatctctaaaataaaataaagaaaaaaaaataaagtctgttgtataacatagcatttacagtattatctgctataagagcctatcatgagggataaatttctaatcattgcttcatttactccaaaccatgggaaaagaaacctaacaaaagatgcccatttggaagagtgaagtcttcctattaattttctccataaccgatggcagcaatgttctctttaacctatgatgtaggttaagaggagggtatccgtgttctgtttctgactgattgtgagacaacaaatgtaccatgaacatttctcacttacactggcccttcatcttccatctatcaaagcataaagttgtctatgtatataaggctggcttcaatatctttcacaaaataaaagtatacccyatgagtccacacaaccatctcctttttcacttttattgttcatagaagtataagcaaggaaaaaaaatagaaagataagagtcttatgatagcagagaagtcttgattcttgatctggtgaaaaagctacccacatcaatggtgttatcttcttctggggagaaattttcctggttagctttaaccttaaggtttccagtgggaatacartaagagtgtggaggggaccttctgagttgtgaggtcatgaacccaaggttcaaggtctcaaagttttgctacaatgtgatggcaaaggacaactctgatgttgttctcagaaaattcagtcttcaggttctagattgtgctcagtcagatcaccatgtaaagctttctttaccttgtgaaaatacaccttgacatagtgcattaaggctttgcagcatttagttatgtcagagtttattagtggaagatacatgagactgtgttattagggggatagtcctttcaatgacataataaaggtgtcaacttatgttttacactggaagtggatgtgattgtcattaatctacaataccttttaccaaaacaattcagtcagttcctctagctttgcccagtactatagtatctataataccttatttaactgttttataacttgtccagtgaaataagtatcctatctctggctatttctccaggaataatcttttagctactgttataacatcagcccttgtgcatgggaaagcttttatacaaccagaaaacatgcactgaaaatgtcttcccccaggtactaagggaggagaccacccctcatattatcttatgcccaatttctgcctccaaagaaagaagaagtaaaaactaaaaggcagaaatgaaatccacagacatacagcgcagcaccacgccctgggcctggtagttaaagatggacccctgacctaatcggttatgttatctataaattacagacatcgtatggaaaagcactgtgaaaatccctgtcctgttctgttccattctaattaccggtgtatgcagcccccagtcatgtaccccctgcttgctcaatcaatcactaccctctcaygtggaacccctagagttgtaagcccttaagagagacaggaattgctcactcagagagctcggtttttcagacgtgagtcttgcgaaacctcccggctgaataaagcccttccttctttaactcagtgtctgaggggttttgtctayggcttgtcctgttacagtaccttcactaatgtcttcccccaggtaccttccctaatgtcttcccctatatgccatttagccacgtggcacccaggaggactatgaagggcagtgcttgtctaagtcctgaatttccatgcctgatgtagaagtcaggacggaagacagctgtgaggaggatgcctggaggatacaacccttcccagaatagccaggaggcaaaactgggccagggaagaacgggtcatgttgggcttgattctggctggtagctgctgttctaggaactgagaactttgccccaggcctcactatggccatctgtccagatcactgaatccagactctcaaaaccaaaccgtaagctcacagtcaaatcaaacaagtacctacttatatttaactgacaattttgaaaccatattttgccaacaatttaaaaactagttttatttaccaaattttatcacatacacttaacatatatagtasacatatgaacacagaagcagatcttctagttttcataaagctagcttataaataatttttcctttctctctttagactatccctctttcaatcacatgcttcattgccctaagcaactgccagccaggcaattccaaatctgtacttctaaagggccaactcccaggccaaacaagaaaatctgtatttcaamagcacagagctaagactttagacctaaatattgtatcatcagctcaaaccaaaaaaaaartagtggaagtaaaagttcagttaagacaagatagtctgaaaagcactttaaaaaaggtttgacttgttatgtaaattgaaaacaatggcaagagtttctaatgtacataggcagatatccttaaaaatggagatttcctttataaatgtaggtttttttacaaaaaggtttaaagatagccagttagattccagaaaggcatattttagttccatgggtgttctttttaacttagctactatttcttagctaaaattactgagttcagcatggagcccattaaggaatagagcaaagaaagcattttccatgactggattcagcatggattgctgtgagaaagaagcaagcctactttaccggaggtcttatcttttgtaaacactttaggatagctttctttttgcctttggggcagaataataactaaaccaaaatgttaacagatattttcttatcaattagtcacttaaactttttatttgccatttgtaaaaagtctcttttaaaaaacagtaaagatattaaaatctttttagaagcttttgcctatcaataggcatccctagktaagactaatttaagaattctcattttctttttcttttcttttcytttttttttttttttttttttttttgaratggaatctcactctgttgcccaggctggtgtgcagtggcaagacctggggttcaagtaattctcctgcctcagcctcccaagtagctgggactacaggtgtccactatcactcctgcctaatttttgtatttttagtagagatggggtttcaccatgttagccaggctggtctcaaactcctgaccttaagtaatccacctgccttggcctctcaaagtgctgagattacaggcgtgagccactgcacctagccaggaattctcattttcagatgcactgcttaaagtgtggtattattcatttggaacattgcattctaattttaaattacctttagtaagattttaccacttctataagtgtttgctgcttccagagtctgatatttatacatgcaaatgtaggcatagctggaaggtggattattcagttctttagaaactaaggatctcctttttaccttacatcttggctttggctatcagatctccttgatcaacttagtcaatgattttttttctacctgagcaaccaaaaagagaaaagtgcaaggaaggggtagaacacaaaaatccctgtgaatttgcaaaagctgaaatttataccttctgcaatatttccatttattatcagtttctgtctgactgggtcagacataagaggcctctaactggatccaagccagttaatatcagatccaacgtgattctgcatccagtccagtttctgttgtgttttctgaacccagttcagataaaaaaatttgctcaaactcagagagctaaaaacaaatccgtggagctttggaatctgagagagaataccatgatccccagttgctgtgagaaagcagtggccacrgtgggcctggcagggayctcacttggtcacatgttgcttctgggcatcggaggaagttctacttcaggtcccacttctgacaccatctgttaaaagaaaaaccttatgcaaatttaaytgagyaaagaatgatttgtgaattaagaagactcctgagccagagtaggctcagagactccagcacagccatgtggtggaagaagatttacggacagaaaaagagaactgatgtacagaaaacagaagtgaggtacagaaacagccagattggttccagaccagcatttgcattattgaacacagtttgaaagagttggctgcctttgattggccaaaacttagcgattgacacaagagtagactacagtctgtttacacatccagttaggttacagttcactatgtctggaaaaacatttaggctgaacttaaaatatgtaaggaagtagctttrgkctaaacctaatttaacaacatgcgtatgtatgtgtgtatataactgtgtacgtggataggtatgtgtatgcatgagtgtgtacacatatgggtgtgtgcatgtgtagttgtgtacatatatacatgtgtatgcataarcatgtacatgtagatgtatgtattgtataggcatgtatagctatgtgcacgyatgatacatgcatgtttaagttatgcatatgtacatgtatagtcatatgcatgaataggtattgtatgtataggcatgtacaggtgtgtatatgcagatgtgtgtacatgtgtaagcatgcacatgtatgggtgtatgcatgtttgagtgtatgcatgcatagatgtgtacacatatgggtatgtacatgcatatttgtatacatgtatgggtatgtttatatgtgtacacaaaagtgtatacgtgaatggttgtatacatgcatgtataggtatatacgtgtcygggatacacatgagtaagtgtacacatgtataggtgtgtgcatatatataggtggaaaatgcttgyctttactactcattgcttttttttttttttttgcttttctcttttcctaaagtggcctatcaagtaatgctttcaaattgagtacttgtgtaaagtattctacaaatggcattttgtactcaagtatctttttcccgctgaacagtgaagagcatcttacttgcataggattcctggactgtggtctttcccattctttgccagtgttcctttcctgatttctagtttcttatattgcaattggatggatakrtgcgataggtgccagtctggattttttttcccctgcttaaatagggktctctaatgcttttttaatgggattccgtaagatcttttgttcagaattagagcagaatatgcttagatgtaactttcctyatcaatccagtgtcaaacttagggaacaatttcaattcatagatttgcatatttcttcaacaaggggaaatttatacatatatttccttatttactgtatatatctgtaygtgtcctccaaatatttttttccttctgaaacgttctttatttgagcattaggtctaccctccaaatctcttttcttttccttcatattactctcttttatatttttgctaaatgctctgatatattttttgcccatgaccacttatatcaaattcactaatcagtctcaacagagatcaacctccttttaaatttatctatttaacttcttagttccaacatcatctgatcatctgtttaagttttatgacatcattttctgcagcattggaaatgccctgtttgtattattattatttattattgttactattttaaacagatgttcttttgtcatctcygtctcttgggtcatgttttcactgagaaagtggctcttctctctgataactattcgggaccctttcatggacagtgacttttttttatcttggctcaagttgtcaagtttatctccatggcagaaacctagcagaaggagacaggttcactgggctgggctatgacatcagcctcccgyaggctaaagcaggaagacaacccacttattcagttcattcttggctttctgagaagtggagacacactgcacrctctgagggcagaagctctcggccagaaatctgaacatgaagccctttcagaggtragctgctctgagtcctcagttgrgcagggctgggsgtggttcccccaggcctgcagcctttaggaggattgtgtgctgcatttttccccagggttcccctgtcctctcaagcacactgtggcctctatattcctatgccacttgcccaggggaggcctgtcccctggggttgtgggggaggggaagaaggcccatctttggggtgctcatcttcagggcaccgtgctcccaaatccctgtgagctcaktgtccgcgtgctgcaatgagcgtcctgtgatgaggacctcatgctggggccaggcgagaccattcctcttgtctttggttgaggtacatgctgatcaaggcctgagctcttcagggagagcacaggcatgtgagctttcctgtctgacagcattaatcagcatatttggtttttcaaggtcacagaagaycctgtttaatcatttttttacacactattatgggggccaggaatgtaccgacacaaggtckgagaaaaccagttttgatctgaarcyaaggggtgacctggaattcagttctaaaacactgatttctttgaagacgaaaaagctcttagaaggatcctcaggattatcgtaagtaaaaagcaaaactggtactacctgtttactgtttcagctagccccctcctgtcttttagcctgggaagagagaagatgaaatcccatgggctctgagcccacatcatctgagaatctatttcatttaaagataattcattaggtttcatttttaatcttatactaagatgaaacttatcataayaggtttctatttggtcatttttctccttgtggagaaacgtgggataattctaattctcctttggtgtgacatcatgtttatcctgtgaagatggctttcttttttataatgaatcttttcttctgcactaaacagacaccytccatcccagactccctagtttcttcatgctgcatgatttagagttgcttcattattctgattttacttatcagtttttctttcagaacattataattcatcaaggtctttattaaagtgtgatgcccagaagtaggcatagctttaaaggtatgttgtggatattgacagaattgtccaatctgwtrtatttcttacctactcaaaaacaaacctacaagccctccattaggaaaaaaataaaaatcatgtggttaatctccaaaaaaagtcagggatcctttcttccctaggcatcctatttgttccactctggtgttgccaacttctttcttttaccttgtggrttaatttctctgcccatgttattttgacacatagatttatactctctattgtgtgtgtatactgactcygattttgtcaatatgagcaagttgcatctaaatatgtatgaaaaaatatgtgcaaatgcatctgaagaagccacatcagatactgtctgcttagatgacctccttcagggaccacttcttgatattctctgtataatyacttatctttgggccacccagcattttactggaagtcattctgggaatgctgtgatttgcacaggaactgccatcagtagtaccagagaatgtggaaacatggcagaggcgaggcartccaggagttctgtgctgcttctgtgtgtactcttgcctcaggtagatggatgtctttggtacaagatacataggagaaaaccagtatacttataacttagtccattaatacagcactctggaaggattaatactggtaaggataatgagactatattctgattcaaayaatgggatattctggccaaagattatgttgcttgttgtccatgaggaggggtttttgtttttctgggtacttgagaaaatgctattccattgacagtgtccaaattrtgtcaaaacaacttacaagttgactcagagcttatataaacagtagggtggtttgggggataattatcagatgaatcagctgcttgattggagtttttgttcttttagccagcagaaacataataattcagtgctgtaggtaaggcctagggaatagtaagtgcccactgaaaatattaagaaaagataaggaaccaagagagctccgacagaggcrtagctggtgaagtgataagcagcaagtgttcaaaatgttgtttgattggattttcttttaaggaaaagggaaaagggaaacctcatgagacaaatgctaaatttgtagttatcaaaagatcacagtaaccaagattgataaatgaatgactataacgagaaagccaagaatcttattttaccagcataaaagataaagcaaaaattttcaaattttctttgagatttaatattttatatcacttaacatactttacagaacatttcacattaaattmctaggttcttttctttccttagctaccttaggtacggattttctttttttttttttttattctttttttgagatggagtttcactcttatcaccactggagtgcaatggggcaatctcggctcactgcaacctccacctcccgggttcaagtgattctcctgcctcaggcgcctgagtagctgagattacaggcacccaccaccacaccaagctaatttttgtatttttagtagagatggggtttcaccatgttggccaggctggtctcaaactcccagcctcaggtgatctgcccgcctcggcctcccaaggtgctgggattgcaggcatgggccaccccacccagccagttatagatttttgaagctggaggtggcctaagagagtatttgactaagaaacaagaccaaaaaaaccaacacttcatcttaagattaggaagcaaaagttggaaaggtttaagtaatttgctctcagttatttattagcagacctagggatagagctcagactccccattgccaagtccatttgttttcctcaccccaccatgtsacctcrtcgttagttttcctttcgttatactttctgtaattttctccaaatctctttcaccagtagttaacataggaactcttctttagctgggtggccttcttttttagaatcttgtcctaaaaaattgcaaatgcaacartcttgacattttaacatcaaattaattttcagtatcagctaatcaatagatcaagagtctttgcataatactgtaggcattacagatgcaattaaataatattcacaagttcttgttaccaatctactaatttcagcaaactctacaattgacacatttgtttgtgtcataaatcagtcaaaactctactgataaaattgactttgcatagagcagaaagcattctcttcaatatagaacagaaaatgatttactctcatttattttagaaattaaaaacttacacctaaggcaggtgggatgtttcctaagacaagataagtgacrtactaagacactataccactcgattaaataaaacttccttcaaataaaacaattgcacaaagagtcaacagatgtatattttctactgggatttattgaaccatgtggtcttgtaatttccagctgcatacgtcacattaagttctgtctttagagcatcaagtaattgtaaatacagtatattttatgtacaaatgtaaatatatttaggtttgctcatgactttctttcaaataaattgtgcttatgtttgtgaactaatgaaagtttaatttctttcataagagactaattttattaccatcgtatttcatgacactgtagtwttttcatgcttaacttataaaatgccttcgaagtattactaaagaagtaagatttctgcaactcctataaagctttaatgaagcaattacattgcaacagtgatctcaggtttgtctttgacagtttttgctatttttaatagaacaccataaggacatctcccactctccttgggtctgttartacctaatatcttgtgtgaaaaacttgttgaaatcaaggtragaacattacagtaggaaaaagggcaaataagtagccctgaaatgatacaaaacagaatgagtgttcagtgatatagatgattaatcaaactctactgatgatgttgactttacatagagtacaaagcattcccttgaaaataaccctctcataagttctaaggataagttatcttccaaatacagcattctgcatttatttacaatctattctatcacataagaaagaaaaatttttctatatcaggattaggtaattcattagcagggcttcaccaagttgcttaatttaagaaaatggtttcttartactagaactttattttaccataaaataagtgcctcttggtattttcccatcagatatgttcctcttagtattttcccgttagatatgtgccttttagtaaacatgagaactgtctttagctgatgaccttcccttttagaatcttatgctaatgaattacaaatgcaayaatcttgacattttaacatcaatttaagctaatttttcatatcagctaatcagtaggatcaagagtgttcgcataatactttaggcattgcaggtgcaattaaacaacattcacaagtccttgttaccaatctacttatttcagcaaattttgtaattgtccatttgtttgtgccataatcaaataagtcaaaattctacygataaaattgacttagcataagcatgatgataaatgataaaaattagaaaatttagaaatcctcattacatttgtaattattaatattgttaaagtatgacattgataattaatgaaatttggtttcaaatatgttcccataaaaggcaaaatatttggtaaacaggatatatgctctgcagatcaytagggaaaaccaacaatgtggagtttaaaggaaacattgaagaacaaaaatcttaaaatcctcataagacccaaatgtgcctgaagtttcagtgcattaagagaattactgaaagtcgaagactgctttatctatccaaaaagcagcttttaactctataccattaacaagggccatacataagcaaaatattgataatggtcacatataaaagcatacatcaaagttaagtcaggcacacagaaacaggagtggcaataacaatacacagttgaatgtaagtaagaaaagcattmactgmaacgaagtttatttcaatctcaattttgaaatagcttagcatccattcagcacagcttaatagaattgtgtctgaatattactaatgagatcaatttgtgaaagatgtctttaactttgtccctataagctaaaattaactttatcttcaaatattcataaagattctcaaatattgattatatgctaggtcactaggaacactaaaattcccagaagcagacttcattatcttttaccacagtgcaactaatctaaaataatcaaatttaaaagaaaatagctactgagaattttttagtcattagaccaaataaatattttatcaagaagtgtaatatctaaaaatattaattacaacattattatcaaaatttatgggtaacagaggtaaatacagaaacaaacttgtagttttattaaaaatgaaataataaaaataaattaataaaacacacagcttaagatgttagagaaaagacagctaaataaatatgaatgtactgagaaagcctgaataaagatataagtggaattgatgaataaatctaatagctggcttaaaaaataaargaaggagaagtaataactataagaaattatatattcatctaatatctartatgtattatataggtataatatatatataatacatagtaatatacacaataacataataataacatgctttttccaataatgacaaagagagaaaaatgaaattgaaaattagaagaagattgtagccattttctttcttggagtcttgagacataggaatgctttttagttgtatacttctttgtaccattgtactcaataggtaatcttcaatactcactcycctcccactctcctacctttcggagtctccagcatgttattccactctgtctatccatgggtacccattgttagctcccactcataagtgagaayatgtgctatttgcttttatgtttctgagttatttcacttaggataatggcctcaagttccatccacrttgctgaaaaagacatgatttcactctttttatggctgagtattattccrttgtattagtccatttccacactgttatagaggtactacctgagattggataatttacaaataaaagagggtttctgactcacagtttcacatggctggggaggcctcatgaaactcactatcatgttggaaggcaaaggagaagaaagcaccttcttcagaaggtggcgggaggaagagagagcaaaggggaagtgtcatacttttaaaccatcagatctcgtgagaacmccctcactatcatgagaacagcatgggggaaaccaccctcatggtccaatcacctcccaccaggtccctccctggacatgtggggcttacaattagagttgtgatttgaatggggacacacagccaaaccatattatccatggtgtatatataccacattttttaatccaccgatgcacttttaggttgatctcgtgtttttgctcttttgagtagagctgtgataaacatatgagtgcaggtgcctttttgaaataatgatttcttttccttttggtaaatacccagtagtgggattgctggatcaaatggtagttctatttttagctttttgcaaaatctccatactacagtacatttttttttatggtgggaattatcttcctgattcatgagagtaagtcgagggcagtgtgcagtggatggttgttgagatgaccacacactaatgtaaccytgaggagtcacgccctcatgtcatcccttttcttcagtgagagcagaacctgtgacctgcttctaatcagcagaatacagcaaaggtgatgaaatgtccctcccatgatgaagctacctcatattagactctgtcttactagatggagggagaaagattcccctgctgattgtgagaaagcaaaccactatgttgtggagataacatttttctgatttttatttattatggagagggcctcatggaagggaactgtgggtggcctccaggtggccttcagtaacacaaccaygaggaagtgagttctgcyaacacagattctgccccagatgacatgagaatgtagcccaactaacagattggagcctcatgagactgagcaaaggacctgctaacctgtgccaggagtcctgcattctggccacggaaggtgtgatgtgctgcrtgtggtagtttgcttgggattctgtaacaaagcaccacaaacgagacagcaaaatgtgtctccccactccagaggctgggagtctaagatcaagtgctggcagggctggttccaactgagggctgtgtgggagaatgcattctatgcccctcaccctacttttcatggtttgccaacatccattgtttcttggcttctgctgtatctctctgacctctaccttcatgttcacacagtattctgtgttcatggctgtgtccaaatttcttctatttataagggcattaatcatgttgaattagtggcccatctactccagtgtggtctcttaacgaattactctgcaacaaccctatttccaaataatgttwtagtctgagttactggggattagaatttcaacatatgaattttgagggaatacacagcaatccataaaaatgyrtttgtatcattttaagccattgcatttgtagtaacctgttaacactgtgatagattcctaaagcaattgtaataagaaagtgaaataccagtaagagtatgaagaaatattaatggggtgctactggaaccgtctcacttcaaaacaattgtggggatagttcagtattgattctaattgaggtgaaacatcatctaaagatatgatgtmttaatatactcagttcctttatgagaactagaagccactttgctattaatacaggagttattaagaaattattttgggaagttagcgagggtaaaagttctcrgtggaattttcctttaataaaaagcagccccaaatcatttcttctctaacaaaaagcagtctgaaaggtcaggctgcaagcatagatatgcatgtgtaaatacatgtggctaagagccaagtycatccaacatggcggttcctgctcccttttccttgtcaccacktgtgcgggtgtcatggccgctgccaggtagaagctgmatttgcggctgggcgcgatggctcacacctgtaatcccagcactttgggaggccgaggtgggcggatcacctgaggtcaggagctcgagaacagcttggccaacacggtgaaaccccgtctctactaataatacaaaaattagccgggtagtgtgggcctgtaatcccagctactcaggaggctggggcaggagaatcgcttgaacccgggaggcggaggttgcagttagccgagatcgcatcattgtactctagcctgggcgacaagagtgaaactccctctcaaaaaaaaaaaaaaaaaaaaaaaagaagctgcatttgctattaaagactagggtgggagggctagtcttttcctaggttatctaaatggcatacctggtcagaccaatcccctgggccctatgcaaatcaatcactgcctcctcaagcctctgtacaaaattgattgcattccgtcccaaaccagagaccctatcttgggcgaccagctttcccagcataaggaagctttttttctttctcttcttttttgtctattaaactttatgcctctaaacccactcctcgtgtgtgtccgtgtcctgaattttttctcggtaagagataaagaaccagggtatataccccagacaacagagatgtttcatatgcratatgaatgcattcattctcaaagtgtccctcaaatttattgtcagttttgtaagtttgctttcagttatttgtacttttcccctttttgcaagcaaataagaggtgttgaaagtgttgaaaataaaaatcagatatatttttgccaatttgaaaaatcaattttgacatatttttaatctatggaatgcagcattgggatactagtgttccaaagttgcatagttttgatcaattcgtggaaagacataggattgcctgagctactgtagctcaatctcccaaacttgaccttgtttattcaccacggactgtcaatccactccaatgaactgcaatattcagacatattctgaaagcaacctgctgtcttgagaattttctagttttattaaagcatttactaggcacctgccacaagcatgtgctgaggattaaccggtaggtaggacaaggcccttctcttctgctcttctcagagaatgtgaggagtaagacccaatgtatccagagagtgctgagagagtgcaatgagtttacattcgacttgctcttggcagttaagaaaggcttcctggagaaggctgacatgacacctatggcatttgtcactcaagtgagaccaaatgaagttggagcaggatcaytggctgtggattgtgcattagggagaaatgagactggagaggcaagaaggtgctgcatagggaagaaccttgtttcacccactaagaatctaggtcaccattcacaaagcaaaggcaggagcagcgtcagggtgggggcaaccaaggctgccctgaatgggaagattcacacacacacacaccccccacacacacccacccaccgttatgcctcttgaacacgagttatctggctgtatcttcatccacatctgttgcygtcttcaaacaccctatctgctgtaattcatacccgcatgtcacacatagaccagaaatttaagctgatctaaatttaagtcatttcattttactttccacactagactcatccatccattcattcagttaacaaataatgaccctattatttgcaagttgcataagccagaaatctaggagttaacyttcttctgttttcctcattctgtgctgtagtgttatggcttttgagtctgactgtccggatttaaaccctgtctcttctgttgaaaagctgtaggactttgtacaagataatataatctttctgtgcctcaggttaacaatagggaagataatattgagtatrggttattgtaaagtttcaaataaataactcatgtaaagcctaagaacagagcttgaaaacatgtrtgtatatatacacatgcacatagatatatatgtatgcatatgtatatatttatataagataaatatgcatagggataaaatcaaagcatctactatactaacattgcatttaaatgtaaatgtaatgttgtttgcttaagagccaaacattcagcaatcaagaatactctgcttctttggcagtatccaggaataaataacgaagtgaattaaaagaaatgatgtcagaactacaacattttagctgtcacattacaagaaacctgccatgtcactgcagtctggtgggttgtttctgttcaggtgtactcatctgtgtatacctgcagtgttatatacatgattctttgctttttgggttttatttatatgaccttgaacaatctattggtgctttaaagtaaataaattctaaagcttcatctttctaaaaaataatgaaagaccatagatgatgagagtttatctgcagagccttttctctatattttttcctttttatatgagaattgaaaagaaagatatttggcttagccggagatgctgcattgtagtggggagaatacttgcaacctattgaaaatcaggaaccatgccttatccacttttattttctctacagtgcctagcctaataccttaattcagtaagatctccataaatatttattgacaaaagctgtgtgctattcagaaatagaaagactgagtttcattttacgattgaagttcactttctttagttgtattcttcgtaaatatttctatgtattttttttttactcagagctgcaaatatttatgcgttattaattatcagtaaagtactaagtcgaggtaacagcataacagtaggggaaaataagcacctgtgggtcccttagtataatgtacagctttatctagaatgtcttgacttcaccgttataaaagtagcaataggtcgggcgcggtggctcrtgacagtaatctcagcactttgggaggccgaggcatgagccactgcacccggcctccagaaattttttatccaattatggtaatatacaacaatatgataattaacttgtaaaccttataagaaggcttggattttcttcagtgaactgtgtttggattttataaataaagacgtttttaattgaaaacaaaaggtagaagtagaaataaaaaagaaaacaagtaacaaccataaccagtattctagacaatgtcactgtggtaattttgggatgttttcattttagtttatttctggtatgttttaataccagtgagttcatatgtataagttttactcttattttgtctagcattatagcatttgcagtttgttgtgttattttaaaaatcwtcctaaatttcatattcatgttagcttaataatctttcatgtaatattcctcttgaatttaatttacatatgataaggtgaagatgtaagtggttttcactttctcttcttttaagaataacttgytagctgcccagaacaaaagtactctctgcctattttccaatttatgctgcctaatataatgtgttaaattcgattgcatggtaagatgctctcgggttgttaycctgttttattttttcaggtattttcccaccaatattaagaatttttatttttgaacttcatatatagtagttttactatctgagaatgttgattcctacgtcattctttttcattttcaaaatatcttagtttccagaccatctgttttcatatgaaattttagagagtgtattaggcagtttttgcattgctataaaaaatacccaagactgggtaatttataaagaaaagcagttgaatgggctcacagttctgtaggccatactggaagcctggtgcaagttatctgctcagcttctagggaggcctcggggagctttcactcatggccaaggcaaaagggagcaggaggcagggcacatgacatgagtgggagcaagagagtacgggaggtcccacgcacttgtaaacgacagatctccaagaactcactcactatggcaggcacagcacaaagacgtgagggagccgctcccacatccagatacctcccaccaggctccaccaacactgggaattacatctcaacagcaggtttgagggggatatccgtactatatcagagaccactttttaaagttccatatttatttgcaacaagtttttcatgttattctcatatctttttgattgtgataaaaacacataacataaaacttacaattttaaccacttggaggacacagtacagttgtgcaacagggggtatcttaaaaaacaaatccctagtgggtatcaggtgtgcctgagacactttgaggagttgccaaatttcaagcattccactcaggactgtcctgcttctttcttcattgtgccaagtccttagtgaataaaagacaccatgcaatccatgcccttactaagtaagattcagcatcactctgcctggggctcctccagaggttctgcagactgccttgcatcccacttgctgctgcaaaacagagattcagtgacatgcaaaagcaggtatctgagactgtggtcacccagcaaaatggaacggactaaatgagtctctctcactctcgctctctactctttcttcttggtactcttgccctctctgactgttaaagaaatgatctagatgagatcatgacatcgcatctcacatgaygctattgtggttacttctttccccacagactgtaggagtagaggacagttcagagcagtgacgcaagagtctcaaaagaaacgctcagctcaatacagctatcctgwtgataaggatatggagttaagtcatctaagaagtaggtatgtatagaaatatctcatttctttaggcaacttactatagatttgcttcaaacctacaatttgtttttatcttttttaatagagaccacagttaacttatttacatataggatgaatcacatgaaaaggagmaaacacagaatgaattctgtaatgtgtttgggttccatttcactctgcaatagcccaaccagagcgtatttggcaatgaatttttctcagtaaagtgcagaaaactaagtgtattagatgctagttttgatcccttaaatgacattatgagttgatatttttcagattctttttgaaaatatgaaacagcatattgtttgcgagaaaggtaatagtatctatttaagctaattcatgttaagttgatttgaattcatgaataatatatggcaagcaaggcttgatttgtgaccaagatggaatatttttgaactcttagaaaattgagaaatgtcagtcttattcctttgaaatcccttaggacttcttttgtgtagcttgtatattagcttgatacaaagtgttgccttaaaaagtttctccctaccattgacttggaagcttctgaaagcagaaacactaccttgagcataggtatgtccagtagctccttttcattgaataaggagtcagtacatacttgtgaaattaagttaccaaaataaacattgcaattcacagcttcatagtccatgcaggttctttcaaggaaccatgtatcctatttttgttgtccatagctgccttctaagtagtataatttagtcaaattcaaaatccatttttggcatccatttcttcaattacagttgtcaacttgaacaatatatgggccctgtactctaagttttaaaattgaggagaggagatagtgttgttggacaagaagtgtgaaggctttagagtcaggcacatggattcaaatcctgtttctactgcttcataactatgcatgttatataaaatttccaaatctccatttcctctgctgtaaaatgggcatgtaatacctactttacaggattattgtcttaacttgaggatacatatgtaaagcactgaatactaatatagtacctagcattttacaggcattctgtaacacacattctgtaatgacacatgctgttgtagtgttcactgaatgccaaacattcttttaagcatcaaacaaatattaactcacttaacgaaagtgcttatatgagtactgawgtgaaatccaatcatggagtgagtagtgcagagcaaggggtgattaattcttattggggccctttgaccgggtagacagaggagggctcttgaaggataagctaagattttgatagcatttaggggagtccaagtctgaaagaacaacatgagcaaagggaagtgaggtgtgtttggagaatggtacaattcatgtgtctaaatgagttggtcccaaatattcaggaagctgaggtgggagcatcacctgaagccaggagttcaagaccagcctgggccacaaagtgagactccatctctaaaaaagtttttttttttttaatttaaaaaattagctgggcatggtagcatacaccagtagtccctgctactagggaggctgaggcaggaaaatgtcttgagctaaggagtttgaggttcccatgaattacgatcacggcactatactccaccctgagtgatagaacgagactgtctatagacctctataaaaaacaaacaaaaaacccaaaatgaatgaatgaatgagttggtgtgttcaataactaggaatgaagaacattcttccagaacrttctgaaagaaggttgaggcaaagagtgaagagctgtaaattccagggtgaggaaatgaaatatattttgtgttcctggagctaatccaggcaaggtaattggaactctgatcaggagttggagtcctagtgagaaccatttttaaataatttgagtgttggaaacattcacttggcccttttatttggcatttcatctgtttttccattgattcaggtgaagcgttttaccagtgtgtcatcagaagtgggtaccggactcaaatattggagggcaatttcccttgttttataagatggtgatggggatcagtcccttccagtggtgtccacaagcacaggcatggataacaacacccattactaccttctgtccttttctacagccacacccaggttttacctcaaagactcattttgcttgtttttgagataaaattaacttattaccgaaacacttaatactctgggtggcccattgaagcccagctcagatgttgcctcagctaaagattggctaattttatttttagcctcctgccaatcttatcaaacttttactcaaacatacactttacaattatgagttcagtttatcattaatctgacaataaaaaggtaagaagagctctgatttgttttgttttataacaacacacgctttagtaatcctttatagattgtttctgttgtgcttaaatgtaccatagttgtttagaccagaggaggtcaaattccctcaaccaacatgcacaaagaattgcggttgtaatttcacttcttgttttctctgtgtgcccattttacttgcacttatcctctcttctctatcttttctttcttctgtcttggtcacaaattaaagctagctttcaatacagtatccaagagtctttttttataagcaatatgttgagttttatgtttttggtaagaatccaaaatatagcaacattcacagtgtcttgggtttttgtgtttcattttttgcaataaccttcctacctgggctcgttgcctctcttctatccttccaaattgtctaaaatgtaaacctgatcattctttaaatcacccaccactctctatggatggaaaatagactgtgtactggttaggagcaaggcccttttttttttttttttttttgaatcttaatcagcatcccagctgtgcagtttaacagctctatatactgtggacatgttaacaactttctaagctgcagtattcttacctgaaacacaggctagttatagtgtcttatagaactactaggcagttaagtgacacagagtgcacgctagcacttcgactcctgcctgcgcagagcaggcactaactacatggacctgacgtgggattctctttacacagcttcccagactcattactgctctgctcccaggcagagggcattgccttcttacttatttatgcattcatgtttgtttgagactatcgtggattttattcttcatattgtgtgttttcagagatttctaattttttttcaatcagaaatcaacaatgcaaagtaatttttgagatgaaagaaccatttttcctgattaatttaagtggtatttttttcttctgaacttctgcttaaacaatttttttctaaaataacatgtgctacctttactatggaaaaaacctatttgtaaatgaaataataaactaaaaatataaataattatgttaaaagtttattctgatgaatataggtcatccctcccctattttttaattgagtactgatgatttttctcttatactttactgcattttgcaaatcttcttaaatagcatatactattttttatgggtaaaaccttattttttatatattttattttactttattaattttattttattgtgataagaacacttaacatgagatcatacctcttaacacatttgtcmgtgtacaatacagtattgttcatctgtccattgatggacacttatattgtttccatattgtgctaattatgaataatkttgcaggtaacatgggagtgcagacatctctttgatatcctcatttcaattattttggctgtatacccaggcgtgggattgctagatgaaatggtagttccatgttgctttttgaggagtctccatactgttttccacagtggctactccaacccacatttccaccaacgttgtataatcytcactaacatttttgttatcttttgttttttggtaatagtcatcctaacaggtgtgaggtgctatgtcattgtagttctagaggacattatgctaagtgaaattagccagtcacaaaaggaagatattgcatgattctgtttatatgaggtatctaaaatagttggattcttagtggcagagaatagaatggtggttgccaggggctaggaggaggacgaaatggagaattgttgctcaatgagtaaagagttttacttatgcaagacaaattagttctagagattcgctgcacaacctagtacccatagttaataaatggtactgtatastttcaaatagattgagaagatacatctcatattaagtatcatcatgaaaataaacaaacaaaaaccaaaacaaaccacatgcacacgtgaaaaaaaataaggaaatttttggaggtggtgaatatatttatatttagtactttgtaatatcacaggtatatatgcacatgtccaaactcatcaaaatgtatacattaaatatgtgtgtttttgtgtgtatcagttgtacatcagtaaagcttaaaatgtagtattgttgcctataaatacaaggttatacctcttatttgtcttcctaatgcagatgctatgtgtcttgcttctttgccaactgttctgctttgaaagaatgtgaggagcctaacggcagcaccctcacatcctgcacccatctacctgagcagaatgcctgatgcatggcccatacccacacatatttgttaaattgtgaataccgtcctactccacaacatctgggctcaccaacatcagccacttccccgtgttcccacgtgtggtcttttgactgttggttatatcttcatacattcattcaggcttcttcaggattaaatacctttgattagacactgaagatttacagaagagagcattatgaaagtaaaatgtccaaccatttgcattaatattatccctaacaatacttgtayatttaaactgttttaacacagtactgtatagaagctagcatgtggtcagtactgattcatggtgcctctagctcacagtgcctcagaggacatggagttatccagtgactaaactactgctgttggtaacttttgttatttttctttktttcccttttttaaattccctgattaatgtaaactctatactatgtctctgatttatgacttgttttacaagctcatagaatgtactgtttctggcaagccattttcttagtaaacaatggaagacatatttcaaatagaataaagcagaacaattttgaaagttataatggtttcttcacaaggaacaactttttacaaaatttggaaaaacgtaagagcacttgaaatgcagatatcatacccaataaatcaaatctatctaaaaatatttttaacaatacatgataattgtaaatagaaagaactttcatttctatttcccaaattagttatttgcttctgttttttgaaagtttcagtaaactcaaagaaacatatcttaaattcaacccaaggtttccttatatccttttattatcaacaagactgagctattttgcatsaggttaaaggttagatttttgtcactcatagtatccttatcttattttagttcttgccatgaatttataatagagaaagcagcttccctacctggctactggataatatgttatattaaatttgtcactgctctttcactgtttaaagtgaaatgaagaattcgttagcaaaagaaatactttaaggtctaaataatatatcaaatatatatgtaatacaacatgaaatttcctttatgtcataagaaatactttcttattattttagataaattacatgaaccagatgtgacactctggattatcatcttatctgccatttaattttaattttgaattccactcataccattttccttttaagatcacaaagaacaccaatcacaatgccttgtacrtgccaaatgwccaaagaagatttgatgatattttaaaattctcacacgacttttatttttcagcattttatttgcttcttgttataaataggcaacaagataaaatatatgtgggtgaagatgctagaaatgtgacagttctggcaaaaacaaagttctcccaagatttcagcacgtttgcagcggaaattcaggaaaccatcacagcactcagagagcaggtttgttttctcytcaaataacatgtccttattgtatgcgttggaataactaaacataaaagatttgtccagtaactctccacaattacagcacagtatcagaataataaaaacctatacagggagttgtattgctttttttttgtttttacttttgcttttttaaagacacagtcttgttctgtcggccggatggaatgtagtagcacaattctggctcactggagcctccacctcttgggttcaagtgattcttctgcctcagcctcccaagtagctgggattacaggcgtccgtcactacacccagctaagttttgtatttttagtagagatggggtttggccatgttggccaggctggtcttgaactcctggactcaagtgatttgccctccttggcctcccaaagtgctgggattacgggtgtgagtcactgcaccggcagggagtagtattgtaataagaagtgagttagggaaggaggccttggggaaacacactacaaacaggcagagagcytcatcctttctacctaacgctcagggctctgatgggcatgaatttggtcggcactggctctgcttgctgcttccaactgcctcaccagcacttttctgaataactgtgaacttgatgcctgcttcatctccacagatggagataatttttaacagcacgatgtatacttttcttatcaatttttcgtggagtagagtcaaagaagcttcttaggaagtactgttttctctggctttctttttctgacaaagttgtggaaaacaacattcccacaccccgctatacttttgcttattttgccagttgttctggctcatgccttatttcatttttccaaaaacttgaggatgaatcaacaagaaggaaaagacttgtattagaaattgcgatgtagatrtttttattcaaaaatatatgtctgatttctttcaaggcatggtgccaagctgtctgcttcttagacagtaatgtcactgtgaggtatatgcttttcttcatagcatcaaagccttgaaagcagaaaacactgtaggaggatgggctgagcccaggctgtgccatcaggaagttctgccctcactattggcctgacccagtcaatttatttaatcattcagaacaagtatcctcatctgaacttcagggctattgtgaggatccaaagagattctagaacagaaggactttgtgaactacaagccccttaaaatatgattgcttcttttggatgtgaacacgtctagtcccaggtggagcggtgtgattaccaggtgcatatgcttccctgagaggctcacattgggargctaagctgcctgcagctgtggtctgtatcagtgccttcacttgaccagaaatagccaccattgaaatcacttgtccaatctgaatcttttttcccttttttttttttttttttttgagatggagtctcgctctgtcacccaggctggagtgcaatgacatgatcttggctcactgcaacctacctctgcctcccgggctcaagtaattctcctgcctcagcctcccaagtagctgggattacaggtgtccaccactgcacctgagtaatttttgtatttttagtagagatggggttttgccatgttggccaggctggtttcaaactcctgacctcaggtcatctgcccgcttcgacctcccaaagtgctgggactacaggtgtgagccactgtgcctggccatccaatgtgctttttttttttttgagatggagtctcgctctgttgcccaggctggagtgcagtggtgaaatcccagctcgctgcaacctctgcttcccaggtttaagcacagcctcagcctcccgtgtagctgggggactacaggcgcccaccaccatgcccagctcatttttgtatttttaatagagatggggtttcaccatgttggccaggctggtctcaaactcctgacctcaggtgatctgcctgccagcctcccaaagtgctgggattacaggcctgagccaccatgcccagcccagtctgagccttataaaaatctgaaagacgtgaggcattgcttctagaaggttacccttaagatagatagcatgcaatggttggggtgactgagaactctggacatcacagagtccggaaaccctatttcatcctcgtgagttaatgtgtatcagggaagagatgttgtaacagcaaagaaaagtcctcagagctgggctrgagaaggtgggcccaaacaatttaaacattaactcatatatcactcaacaaactattttttcataaatttaatttatggatttacagacacaggtagattccatgagcaacatttcagttcaatttccatttcattacatattggtggtgataattgtgtatttgatatgtgctgtagtgattaaaaacatcccagagatgtatgtttttaaacataccccaagactgcagtagttgccccttctaggtgtttagtagcattcttagtacttatatctaaatttatcaagatggagtgtttttgcctgtttaattgtctgtctcttccattccactgttaatttcttaatagttgygactatttcacaggggtatcttcagagcctgatacaaagtctgtgtttaaaaatagccagtttctttgtgttggaacatgaaaagttagctctagatctctccataatctaaggtgtgtgacaggctggacacggttcaatgagagaattagaaggtcctgtgatctcttatagaggtcagagacttactcaagctatgaccaggctgtagaggtggaaagaagttgcagcagttcccagtgcctcatgtacactgagtgacatgtagcaaatgcctgactgataggaattaaacaataaataaacatgacataacaccagcaataagaaatattgaccaaagccagaaatcaacccagatcatctaaaggggattgagaaaaataaagaacccaggatagatagcaatgataaactgcagatttcctgggtgactgtcaggtgcaactatagtagagtggggagcacccaaaggtagatggggatgacgaagacagacttttgtgagggccaacggtcttttgagatgcgacaagccctgagtatttgtgaaattagcacttactactgatctgtcacttactatactgagacataaattttaatggtccacattgaaaggtaggttgtaacagtgagcctgttagctggagaaggaaatttctgattgttcagtgtatgccactttgtggtttttctattactcaccattgtggatgcagtaagtcctgtgaaaaggttgctttttacaaaaaccctttgttttgtgaaaaatcagcatagagataaagggcatgtatatttctggaagtgaaattagtgaagaaatagattaaacagaatctagaatgtttaagagaatctatataccataatgggcctcatcatgggagattactaatgttcttgagactcatcctttagatgtgaggggattccaaacttcagctaaagatttcttacctttacttcctaactctaggtgacattacatttatggtctgcaacataaggtctgtcttgacatttcacactgttgatgttttacctttgttaagtgacttttgaatgtctaggaatgatgatttttggtcttgatttatcaccatgatgggatcaagctaaccaaagtggtctgcaaattttcatacatgttatagctcttgtgtaagtagttgggcccagtaaattatatttgcccttttcgtttgattctgattattgtgggaataactagagccataattacactcagaacattttattatttctatttgagattgtatctagtttacctgactgtggagagggcatgratgtgtgtgtgtgtgtgtgtgtgtgtgtgtgtgtgtgtgtagggtatataatgaacaatgagatgagatataagaatttacacttttaattataataaaaatgttaatgaggtcttcacagatattacaaaaatgtgtgcatgcatgtactcgaggtactacaaataggagaggttttaataaaagaagttagagaktctcacaactgttggagcagtgagaacaaaggtcatggaaacagctactgaaaggagctcaccaggaagccatagcacatctcagtcatttgtacaggatccccaagcccagccctcctttatgcatytgctgacaactgcacttaggatagtatcggcgtctccttccaaatcttatatcagtgcctctcattggtagactctaacccaaaaccacaaagggaaagagatccaggaaagatggtacatgacgccagaaaaacactttgtggtcacaaagacagaattctgttctgaatgccrattacataaaacaaataaacaaactgatataaacagagatatggagatcactatgtcggccactataatttgttaatctaaaattaattaggtctggaaaaaaatgcatacattagaactgttctagaaaatccagcctcctcacttcattaaacaagtaaatgtagatggttgaaaggaaggaataaaagatactccagaggctttcttaaaattaggagacaggtaatgttattaccaaataacaattatagaaagtgaaacagttaagattaaataggttatgacatacgtaaggaacagaytgatgntcagtgtggctggagattagctaatcaaaattgtcaaaacaatgtacaaggagcctggtgaggcagaaagtttctagatgagaagacctaataagctcatattagattttcttctggaatctaagtatatgaggaaggaataaacattttttcttctggatggataggaattccaggaatttatccatctcttgtaggttttctactttatatgtgtataggtgttcatagcagccttgaatgatcttttgcattccggtggtgtcagttgtaatatctcctgtttcatttctcagtgaggttatttggattctctctcttcttttcttggttaatcttgctaatggtctatcaattttatttatcttttcaaagaaccagctttttgtttcacttatcttttgtactttttttagttttgattttgtttagttctgctctgatcttggtaatttcctttcttctgctgggtttgggtttggtttgttcttatttctctagttccttgaggcatgatcttagattgtctgtttgtgctctttcagactttttgatgttgacatttagggctataaactttcctcttagcaccaccttagctgtatcccagagattttgatatgttgtgtcattattgtcattcagtttgaagaattttttaatttccatcttgattttgtttttgactcaatgctcaatcaagagcaggttatttaatttccatgtatttccatggttttgagggttccttttggaattgatttccaattttattccactgtggtctgcgagaatgcttgatatgatttcaattttcttaaattcattgaggctcattttatggcctatcatatgatctatcttggagaaagttccatgggctgttgaatagaatgtgtattctatggttgttgaatggagtgttctgtrtatatctgttatgtccatttgttacaaggcatagtttagatccattatttccttgttgattttctgtcttgatgacctgtctagtgctgtcagtagagtattgaagtcccccagtattaatgtgttgctgtctatctcatttctttggtctattagtaattgttttataaatttgggagctccagtgttaggtgcatatatgtttaggattgtgatattgtcctgttggacaaggccttttactgttatataatgtccctctttgtctcttttaaccactgatgctttaaagtttgttttgtctgggtgtctattttcataaatgcttttttccacccctttactttaagtttatgtgagtccttatgtgtgaggtgagtctcctgaaggcagcagatagttggttggtgagcttttatccattctgcagttccttatcttttaagtggagcattgagtacatttacattcaatgttagtattgaaatgtgaggtactgttgcattcattgtgctctttgttgcctgcatactttgttttttgcttttactttttaacttatattttgttttattggtcctgtgtgccttatgctttaaagagattctgttttgatgtgttgccaggatttgtttcaagatttcgagctccttttggcagttcttgtagtggtggcttggtaatggtgaattcagcatttgtttgcctgaaaatgactgtatctttccttcatatatgttgcttagtttcgctgtttacaaaattcttggctgaagattgttttgtttgaggaggttgaagatagggccttactcccttctagcctgtaaggtttctgctgagaagtctgctgttaatctgataggttttcctttacaggttacctggtgcttctgtctcacagctcttaagattctttccttcatcttaactttggataacctgatgacaatgtgcctaggtgaagatctttttgcaatgaattccccaggtgttctttgtgcttcttgtatttgcacgtctaggtctctggcaaggctggggaagttttcctcgattattcccccaaacatgttttccaagcttttagaattgtcttcttcctaaggaacaccgattattcttaggtttggtcatataacataatcccagacttattggaggctttgttcatattttcttattcttttttctttgtytttgttggattgggttagttcaaagaccttgtcttcgagscctgaatttctttcttctacttgttcaattytattgctgagactttccagagcatttcacatttctaaaagtgtgtccaaagtttcctgaattttttattgtttttttctttaagcactctatttcattgaatatttctcctttcacttcttgtatctttttttttttgatacaagctcttgcattgrgcttcgcctttctctggtccctctctgattagcttaataaataacctcctgaattctttttctsgtaagtcagggatttcttcttggtttggatcctttgctggtgaactagtgtgatttttgggatcattgatgagccttgtgttgtcatattaccagggttggttttctggttccttctcatttgagtgggctctgtcagagggaaggtctagggctgaaggctgttgttcagattcttttgtcccacagggtgttctcttgatgtagtactcacccccttttcccatggttgtggcttcctgtgagctgaactgcagtgattgttgtctctcttctgggtctagccatccagcgagtctacacagctcctggctggtcctggtggtttctgcacagaaatctgtgatatgaactctctatgggtctctcagccatggatgccagcacctgttctggtggaggtggcagagggtgaagtggattccatgacgtttcttagcttgggtggtttaatgttctatttttgtgctggttgacctcctgccaggaggtggtgctctgcagaaagcatcagctgtagtagtatagagagggactgggccctagaactaccaagattatatgtcctttgttttccactaccagggtgggtagggagggaccatcagttgggggccgggctaggcgtgtgtgagcttagactctccttgggccagtcttgctgcgctgctgtgggggatggggatgagattcccaggtcactggagttgtgtacctagtacctaggaggattatggctgcctctgctgagtcatgcaggttgtcgaggaagtgaggaaaagccggcagtcacaggcctcatccagctcccatgcaaaccgaagggccggtcccattcccaccgtgacacctgcaacagcccctagtctgtttccaggtggagggcaggcttgaaaacttgccagaagctttcaggctttctgcctcccagctacgaaagaaaagggctttagttcttcccctgcctgtgatgtctgtaagccggattcacgccctccccagagttctggctaggaagcttctgtccccactgaaattgttacaaagttcagctaaggaagtccttctctccagtgcggttttatcccctgctcctccagcctctctcctgatggatccctgcagtgtcaggcaggaawgggctgcttggggattcagtgagctcccagggcctccctgctgcctcctccacccctgtatttcacttggcttggctctctaactcaactcagctccaggtaaagtcgggaacatctcccacaaacagaccttaagcttctccagtgggkgtgtgtgtccgggaaaggagggtttccttttcccacttctgcagttggggcacttacagtatttggggtgtctcctgggtcctgcargagcagtctgcttcctgcagagggtctgtggatcctctcgggattgctggtttgttcttgcagttgatctggagttaagtttcacaaygcaagcctccgcaatgctgcagtatccggatctgcaatctagtcctgcctcctgtctgctatcatctatcggaagtccttatccattgtattctgaaagcaaataacttgtttggtttctcaggttcacagattgagaggaattttctctcaggatcagtcatactctagtcttacccataattggtttagatgatattttaatgagatttgaggctyggaatggattaagactttaggggctattgcaatggggtgaattgattattttgcatgtgagaaagacatgaattttaggggttcaaagggtgtagtgttatggactaaattgtgtcttttcctcaaattttcatgttgagttctaatccccagtacctcataatgtgaatgtagttgataaccatctgcaagccaagagaaaggcctgagaagaaatcaaccctgctggcaccttgattttggactttcagcctctagagctgtgagaaagtaaatttctgttgtttaggctacccaatctgtggtattttgttatgacagccctagcaaactaagataccgtttttgcagaaatgaaacagcctgtcgaaaattcatatggaattataagggatgctgaatagccacattttttttttaatattgccctgtagttcttagattttatattagttttccattctcagttttttctttgcattttagtttgggaagttactattgacatatcttcaggtcaacagattctttcccctgcaaccttgagtgtgatagttaattttatgtgtcaaattctggatcatgggatgcccagctatctggttaaacagtatttttcatgtttctgtgagggtgtttctgaagagattagcatttgaattggtggactaagaaaagcaggtgcccctcccagtgtaggggggcatccttcaatttgttcaggcctgaatggaacaaaaaattggaggaaggttgaattaactgtgcctgacagcttgagttgggacataagcctctcctgccctcagcactcctggttctcaggccttcagactcagactaatctataccatttgtcctctggctctccagcctttgaactgtaccagtgacattcctgggtctccagcttgcagacagaagattgtggcccttctcaatctccataaacatggatccaattccttatagtaaatctctttatattcacgtcttattggttttatttccctggagaatcttgactaatacattacgtctactgatgaagccatcgaaggcattcttcatttctgttatagttttgatttctaacattttcttttaattcttcttttgcatttttatctctctacttacattacccatgttttcctgaatgttgcctactttttctactagggtcatgaatgtattaatcatagttatttttatccctgccagataatttcaacatctgtgtctcatgtgggtctgcttctgatgcttgttttgcctcttaaaactgtgttttttcccttcctttggagcacgccttgtaaattttgtttaaagccatacatgatgtcttgggtaataggaactgtagttgataagcctttgctttaggtttttgtattgaaaaggctgactgttgtgctgtgtttagtgtttcctgtagctgtagatgccatggctttaaattcctccagtgtctttgtttttgtttttcctactgactttggcctttcttatgtattcttcctcagagagagtctgtgtctttcagctgcttcagcagtaatcactgttattatgctggcatcctgttgatgtgctggtcaggtgtggggatgggaaatattttatcatcctctgatgaaacctcagctttctagtgggcttatgttctgaggctatgattttcacaagcattgctccagtactgtggccttttctccacctcctactcctttccctggctggtgtgcagctaattgatttcactgaagggctgacccctggtttttctgttggctttttcctgattaagtgagtcaggaagcctggagtaggatgcagtgagttagaatcccttttcccagtttgttttaggatttagtactgtaccctggcaagttcctttcccttggtatagaggccttttttatggagaaggctttgggtgtttttcatgaaggatatcttcccctcccgctgccagggccaggaggggctgtttcttggatctcttcaatgagaacctcttaagtttccttaaggtaaacttcttgaataccttacctcactaagacagtaacacctagtagtttgtcatgctcacattttttatattgccctgtagttcttagattttctgttagtttttcattctcagttttctctttgcattttagttcgggaagttactattgacatatcttcaggtcaacagattctttcccctgccaccttgagtgtgatagttaattttatgtgtcaatttctggatcgtgggatgcccagctatctggttaaacaatatttctggatgtttctgtgagagtatttctgaagagattagcattagaattggkggactgagaaaagcaggtgcccttccccagtgtaggggtgcattcttcaatttgttcagggcctgactggaacaaaaaagtgaaggaagcctccagcaacttcttaaaatttaccatttaagagtttgcattagtcagagttctccagagaactagaattaataggaaatgtctgtctgtccatctgatatgtgtattaaaaggcattggctcacaccattatggaggctggacagtccaaaatcttggcctgacaggctgaagacccaggacagctgatggtgcagatgaagtggaaggccatctgctggagaagtcagtcttgctctgggaggctgctatttgtgttctattcaggccttcaccttactggatgaggcccacccacattatggagggcaatctgctttacccagaattcaccagtttaaatgttaatctcatccaaaagcactcccaaagctgactcataaaactaaccatcagggtgttcccaccagtatggctcaatgctcagtcagtctgtcccaggtaagcagatcttggttgctgcctctcttgttatcctcctgtctcttcagatttcaccttagtggtttgcccttcaaccttagctctctaagaaatttattgattttcagtgtgtccaatttttcttgtcgtgaggatgggagtgatgatttacaagcttgccacatgctggaactaatgctggagttgctttatgttttactcatatttctgaacacaaagagacttctttgccaatttaaaagtcctggtatcttgtaggagatgtggttcttcaggtttatgggccatgctcttgcataaaacatttggagatgcatcttaagtacactgagcaaaagtattgaactttacaacattgagtcttggagtgctcttgactttatagttcaagcttatgtagttacaattctgcagtactttccattacccttttaattttgcatacaaaaggttttcagcaacatgaattggttaataagaaagctcttctaaattttccgtaactgtttccktacagctcccagtgaaaagacacttacatgattgtatcagggccatcactgaagaagataacttggtaattcttgttgttgtgatgagagttttttctttcactggcgttttatacagcggcttggtctagattaagccatgaattagacaggttttgctaagttatgctctagtaacaacccaaatcttggtttatggcaacmaggaggattgtttttcactcacgttgcttgctctttggggttcagctgtgtctgtcctccacagtttttcaatcttccaacccagaggaaggagcatctctaaatggagtataccttcctgttgcagaaggagataggcaatagaagtctcattagacagtacctcagaatgtgatgttttttggcttgtagatctctgtctttttgttcacatgggattatccctgtgtgccaatctgtgttcagatttcctttgtttatgagagcatcagtcatattgaagtaggggctcactctactctgactttatcataactagttacatctgcaatactcctatttccaaaaaatatcacattctgaggtacagagggttaggacctcaagatttgaatttggggagtgatgcagctcaaccccaagcaggaaccatgcagataaggatacttctggaatgcagaacaatgatgcaatcattgtcagtattatctactttgacacagcagctgctttttggggaatgcagtgaggctgagaaggctacacttttgattatatatccttaggaaatctaaaactgcaatagtttgaataaattaagtaaaaatgttacatgaaatagtgtctaatgagaattctatttctgggaaggccgagtagatgtatttttgcctcctgcttatttttcttttatttttactttttttctgagactgagtctcactcacccaggctagaatgcagtggtgcaatctcggctcactgcaacctctgctttgcaggttcaagcgattcttgtgcttcagcctcctgagtagctcagattacaggygcctgccaccacgcttggctaatttttgtatttttagcagagatggggtttcaccatgttggccaggctggtcttgaaatcctgacctcaagtgatccacctgcctcagcctcccaaagtgctgggactacaggcatgagccaccgcacacagacgcctcttgattatagtatagacagctacaacccctggatatcacgtttaaaacaaacataagatgactcagaatggtgaagagcaagaaagcagactgatcagggaccttgkgctccaggaacaatgtgatgctctttcctgggtagtttttcctcacgtagctcaggcttgaaactgaagaagccagcaacctgagcacatcaacagacacagaaaaaggcccaacaaaacctgagtccctctagacaacaggccataaaagtggaggcctagcaatacaggtaacttctagacaataaccactctaccccagccaaacagcacagaagaaactgtggcccccacctccagcaagaccagcaaaggccaagtgaggaggtggctttcactctccccagggtatactgaggcacctaaggacaccttgaggctgctgtccgagaaagccaagtaggaaactagggggtcatcatgccagatgattgcatgcaaaaacttggggtcataaggggagcctgggcttccgtcctaacccagcaggaatgaagctcccctccctcttcactggggtggttgcagagaaggcctagtggaggttccaggtgctctccatttaccagggggtgatgaggctgccctgcccctcaccatcctgaggtgcatggaggccatgtcgggagaagtcacagaatactatgcctcccatccaggagggttatgaggtggcctgacagggagccagaaccccaactctacccagcagtaatgaagagaacccctttgtgtgtcaacggaggccaaggagggaacctggacttctattcccacatggcagtaatgatgtgggacccctcttcccatgccagagcagtttcagaggaaaacacctaaaccagaaggcttaagtaagatccaaaacctccaggtttcaatacgaaattattcatcataccaagaaccaagaagatcccaaatggaatgaaaacaggcaatcaacactgaagtgatagaggtgttgcagttatctgaaaaagatttcaaagcagtcataagctgggtgcagtggctcacacctgtaatcctagcattttgggaggctgaggcgggtggatcacaaggtcaggagtttgagatcagtctgaccaacatggtgaaaccccatctctactaaaaatacaaaaattagccgggtgtggtggtgcatgcctgtaatcctagctactcaggaggctgaggcaggaggttgcagggagccaagatcacaccactgcactccagcctgggcaacagagtgagactctgtctcaaaataaacaaacaaataaataaataaagcagtcataaaaaatgcttcaatgagcaatttcaaacacactggaaacaaatgaaaaatggatgaaaattttcatcaaagtaatacaagacacaaagggaaacaagatggagattttggaactgaaaactacaataacagaaataaaaaagatcagttgatgggctcaaaacggaatatggatcagaggggaaagaatcagtgaactggaagatagaagactagcaattatacattctcaacaacagagacagcatagacaaaaacaagatgagcagagcctcagaagcctgtgggattataataaaacatccaacatttgtgtcattcaggtcttggatagaaagaagagagaagggraggacaattccaaagaaatgcacaccaagacacatcatagtcacacttttgacaacaaaataaaaaggaaaacattttgaaagcagcaaaagagaaacattaccctgccatttacatgytgaatggtgaatgcttgaatgctttccccataaaactgcaaggtattgcaaacaaggcaaggatgtccattctcaccactcttattcaacctaatgctggaagttcttgccagtgcaataagtcaagaaaatgaaaaggcctatagattgaaaaggaagaaataaaactattttcagatgatacagctgcctacatagaaaatctcaaggaatctacaaaaatactcctaaaatgaatacatgagttgagcaaggttacaggatacaacataaacccaagataaacgtagaaaaaattaatggcatttctgtatactaacaatgaacacatgggtgataggaaaaggaaagttacatccttttattatcaagactttttagttaagcctggaataaaagtgccacgcactgtatttcttatactaatgacccgtacaagattctttttttttttatttttttattttattttattttattttttttgagatgaagttttgctcttgtcacccaggctggagtgcaatggcatgatcttggctcactgcaacttctacctcttgggttcaaatgattatcctgcctcagcctcccgagtagctgggattacaggcacccaccactacgcccggctaattttcttgtatatttagtagagacagggtttcaccatgttgacccggctggtcttgaacttctgacctcaggtgatccccctgcctcagcctcccaaagtgctgagattataagcatgagccaccgcacccagccctggtacatacaagattcttaaactatttatttcccttcttagagcagggtgtggtggtttaagcctgtaatcccagcactttgggaagccaagacagagtgattgcttgagcccaggagtttaggatcagcctgggtaatatagcgagaccccatctttacaaaacaacagcaacaacaaaaaattagctggacgtggtggcatacaccagtggttccagctacctgggaggctgaggagggatgatcacttaagcccaggaggttgaggatacagtgagccatgatggtgccactacactccagcctgggtgacagagcgagactgtctcaaaaaacaaaacaaaacaaaaaaagcaaaactatttcccttaaataatttattaatttgttagcttatttaaatttgaaaaagctttactgtcctaagtgcctaaagtttagaatagatatgcattttcccagtgtttttggacataaaagttttctatrtgtcctagtctgctaggacatattcattaatatctttagagatttttttgtgattttcatacttcaaacccatgaccccactcaagaatggattatttggttcacatctggttattgtgaagccttgtcattcaagcctgcattgtaatatttgtcttatcatcctctccattctcactgctcacctaaagtcaggggtcaagtyctgctagtttattagtgtattagctggtacatatcaggtactgaatatatctattgagtaatgaatggrtggatgccactgcccaagtgtaggcactcatgctaaattatcttccaagaaccaaccctcctgtcctacttcaatacaaaagcagtgaaaagaatttacagaatcaaaattctttcacatcaagactttttgctttctaaatgaagtctgagttcatcgtgattttttgggttctcctcttctccttaaacccacatctagccaatctcctctacctgctacatggctctttttgtctcactccctccttcctcagtggagcccatattggtctccatgttagtttctcaccagtgatccttcatgttgccacaggagtgatcattgtgatgttatttcccattgcctggagactgcacttaattaatttatgtgacttttaagggcctaattttctttgctgcccactcatcccacctcagttcccactaacatgttctctgtrgatctccccaacaaaggaggggagagaaatgtacatttctgaaatactgatctgtttctggtacccatgctttaacacatatttttttttttccatttgcctgaaatgccttttccctgcttgttctcctgaaagacatggtcatctctcacagctcaaatgcttttttccatatatcatatattagtctgctcaggcaccatagcagaatacaagaaaatgggtaacttaaaacagtttgttttttcacagttctggaggctgaaagtccacgatcaaagtgtcagcagggatggtttcttccaaggcctcacgccttggcttgctgatggccaccttctccctgtgtcctcacatggccttcgctgtgtgagcacatctggtgtctcttcctcttttttacaaggacaccaatgttattgggttagagccccactcccatgacctaatttaaccttaattacatccttcgaggccctatgcccaaatatagtcacattggggattacggcttcaacttatgaattttgggggaacacagttcagtccataatatcaggcatcccctcattccctgaggcagaactgagtgtggcttctgtgttagttcattctcacactgctataaagaactacctgacactgggcaatttatgaagaaaataggtttagttgacttacagttccatagggttaacaggaagcatgactgggaggcctcaggaagcttacaatcatggtggaaggcaaaggggaagcaagcaccttcttcacatggcagcaggagagagagagcaaatgggggaggaactgccacacacctttaaaccatcagwtctcatgagaattcactaccccgagaacagcatgggggaaatctgcccccaagatccaatcacctcccactaggtccctcccccagcatttggaattacaattcaacatgagattgggtggggacacaaagccaaaccatatcaactgcccttctgctccccttgggattcctaaagaccgttattatctaaaggcttatagctgtggtttattggcctttmtaccaaattgtaaagttggagagaccctggtctgcttgctttcatctttgaaacttaataaatatttgttaaataaatattattttataacaacttgggggacaaaaaataaataaaatacttattagttgaatttacaagtgtgcttattgagaagattttccaaatatgtaatttcattcatttgattttaattccccttcctttagaaattaactctttcatactctaggtccatgttcaatattttttaacacctacagaactgtttatttgtttggatactggatgattcaagctcattaagtcctgggggaaaatgaaaaattatgtaggctttgaagtttcttttgccttctaggtgtgtgcttacagaatagagcatttcatcaaaccatgttattgattggctttgttgctatccgcttcaatttccactcttctttcctttgcctcccctttcagataaacaagctggaggcacgcctgaggcaggcagggtgtacagatgttagaggggttccaaggaaggccgaggagcgctggatgaaagaagactgcactcactgcatttgtgaggtttgtgctgcgagttttccagtccaactccccrtttcacttctagccagccagttgaagcatacttgaaaaattcaaaaggagaaaaaatatattttatgtcaatagattctaggcatatttttaagatcaaggtactggtgtgaaattttgaggcttttgcttattaataaaagagtatagtcacaatctaatgagcagtcgctagagaccacgagctttttccatgttcactgatggacgagggaaccaaggctaaggaagtttatgtcagtaagtaaactgagccaacctgggacttgagttcatctcattattcttcagtcaggctcattataaatgctgcctaaaggcacttggtaaacctacacaattctatggaaaaataaaaaagtgttatcatggtgtctaccaaaacaaaagaaaataaaaatgctctgtattcgttatttagtttgctttttgaacagagctgattctttccagccatgtagaaatgcatgaacttcctcagctaatcctaccatatggtacagtaaggtaggtaacattttatagggcaggcttgctgttcgtgctgcaaatgtatagaaagaaagaatgaatagaaaccatgcaaaaatgagctcatactatgagcattttttattatattgagacagtcagcttattagattatgtattataagaaacatttatttgtcttttaagtactttgaytataagaaacatggaggtgatatgtgcatgctgcctttcagagtggccaggtcacctgtgtggtggagatttgtcccccggctccctgtcccagtcctgaattggtgaaaggaacctgctgtccagtttgcagagamcgaggaatgccaagtgattccccagagaagcgctaataaaagttttgtgctgttgagccccaaatgggaaatttctcaggaagagacatttaggacttcagaacttttaacttgtagtcacattgttgatatggaaaccactgacttaagcaacttagttcatctaatcttacatatacttacgatcttttattttttcattttctaacataccttgaaataattcaaaactaaaagcaataaagtgcatatgaagtgtttgatcataagaaatatttcttactgtaagctgtcagttttatatgccacacctggaaataaaaagaatatcatggaatatttaaaaaatatatgagtattgtggaaaatctctaattttggaattcagagaggtttcaaggtttcatatctgcaggaattttgaaataatgagttttgcacttacagaaaacatctggaagggtctgtgatacattcgtgacaatgttgtgatgctgttctccccactgacccccctttctcagatctacaacctagacaattgtcagactttgctgggaaggcacttatcttaaccatcattagtcgctaagtcctcggacataaggaaaaagtcagtgaaggaatatcattattttagggagcttgttagttctgcatgtggctgaaaaatgcaaactctctgagagaaagagactttaaagtagaactgctcaatatccaccttcctcttacttggcattattgccattcctgagatgtcaaaattgaaatataaccaagcctgaaattcaggagcaatctgaatttactataagcagacttgaaagtgtttctgacttttacaaaaggtgttactgtggggttcttctaatttgggcactttcttacagcatttgacacagaaccccatagacaagtgtatttatactcagaattgagtattaagtaatttaggtgattttcacttcatattagatcagagcctttaaaatctgatataaaaatatgtacccatatgtggggttgatagatctttttaaagaatactttgtgccaagactttttttttttttttttgagacaaggtctcactctgtcacccaggctggagtgcagtgcagtggtgccttcacggctcactgcagcttcacctcctgggctcaagcaatagtctcatctcagcctcttgagtaggtgggactacaggtgcacgtcaccatgtccaactaattgtttttttttttttaattttgtagaaatagggtttcactgtgttccccaggcagatctcaaacttctggcctcaagctgtcctccctcctcagcctcccaaagcactggaattacaagcataagccaccatgacagccaaaccctttaaggaaagatttcatgtagtgtcctgccaagagagggcctcgaagagagagtgctactgtttttcaattacaaaataaacttttaaaaataggcatcatttcccaatatttagagtccttttgtaaaatgcagtattagttttagagaaaatattctggtggcttttgtatcatgaatgaggaaagatgtttctagagtttgtagtgtatttcatcgttttaaaatgtgttaatgattcccaagatccaaattaatttttactaaaaaggtttcaaaggataaatcctaatatgccataaaagtttcatatttcatggcctttcaaaatccaaaataatttttaattatactaagttttaaaagataaaacctaacaaatctcagatgcttgacatttggtggccttttaaggcccaacattgtgaaatgcagctaaatcttatgaatgtaagtgtaatgtgtttctcagaaacagtcacagtaagcttacctgcagatgacagtaacaaatgacaattactggccgggcacggtggctcacacctgtaataccagcactttgggagtccgaggcgggcagatcacaaggtcaggagatcgagaccatcctggctaacatggtgaaaccccgtctctactacaaatacaaaaaattagccaggcgtggtggtgtgcgctggtagtcccagctgctggggaggctgaggcaggagaatggcgtgaacctgggaggcggagcttacagtgagctgagatcacgccactgcactccagcctgggcgacagagcgagactccgtctcaacaaacaaacaaacaaacaaacaaacaaaaaatgacaattacgaacgaacttttaagtttagttttctcataatattcatttgccgttgtttcatcttactgccatttaagcaagacctatgtgattgctcattttattttttacacactgaccacatgttaacttggatgtcacatggttaatatgactggctcatataacataaacaaatattaaaataacagaatgaaattatcatttaaaatagaactggattgactacatgaggattttaaaaactgtatgtcgattgacaagaaaacttgaaaattcagccaactttatagacatcattataatttagtcatataaattgctttttgctttgtatattttactttacaacacttatttgtctatgtttttaatgtttttattcttgaaaataatattgcaaatggtaaaaatttcaagtatttcccaaggatatatataccctgcccttcatttctccagtctaagtgcaatgattatttttagttttaggttgtgtgtgtgtgtgtgtgtgtatgtatatgtgtgtatgtgcctttgtgtgtgtgtagtagaaatttccattaatcagattgttaaagaaagtaccacatcaaaataaatgagctgggtaaaggctacgtaatctgataagacttacacatgtgaagtggtaatgatatcttgagagaaaaggaactaagtcaagttagaaaagaacctggatttttagaaatttagaattgtttagaagtggaaagtatcaagtaatctgttttttggaaaagcatgtgaaagaaacaacatgactagctgtcagggaatggaatatgtgattgacaatatgatattgtttgcccacaaaagaaagaaaaaatgtataaagctaaaacacatgaactggatgtgccagtaactctgaaggacagagcatggaggcagagctgaaggagcaggctggagccacacagatctatgctgatgaatctggagaacattccaatttgatcatggtaatgaaccaagcacagtaaagacaaggagccctagtggccagtgttaaatcaaagcccagacactagaagtgcaaagagcctgcaagactacgttttatgttttaaacccatgccccaaatttctaatgacatggaaaactgaactaaccagaatcctgttctgtttcacatttctaaaatgctgaacaaaatgtgatacagaacatgaaatatgtaattcaatatgagagaaaaaaacacagaaaatctctgagttttataacagaaggaacctaaatcaagagatataaaaggcaagccaggggcaaaataaagtcagatatagggcccagtaaagttgaggctggtgttttaaattcacactcgggattggatggtgcagcctggggccaggacaacactatgagcataaaccaagttgcttccttaggacgtccttcccatggaggatacctggaaaatctgatctccagtccagggatgctgcagagaaggtcctttctattccagcttgggatagaagaaactcttatctcatggcctgtggaagtctgcaaccaaattgacactagccttaaagtttggaaatcccaagctaggaaacggatgtgaacagttgccctgtcccaataaagaaatcacaaaccatatgaggaaatggcacatcacacagattaatcaagagtcacaacaaacaggattatgagcaccccaagattttaagatagtaaaaaattctgaaggatactaagagaaggaatggagctggtggaaaataagaaacattttgaaaaactgaccctgtgctgcactttgtattttaacaaatttcagtgaccaagtggtattttacattgtatgttacttcataacaaatacaatcaaaatagaaaactaataattaacaaaatgatagcatatacatacactttcataaaaaatacactttcataaaaaaagagattagaatggaaattataaaatatttagactgaacccaaaactaaaaagtaaaaaaaatatatatatcaaaacttgtggaaagcagttataattgtgaagtataattgagtgatgagcattagttcactttgatcatatctgaatgatttctatttttagcctctgcagttctctctgaccacaggtaagcacagaacacttggcacacaggactctgatgcataggccgcgccaccgtaggcgtttggggtggaagggagtaatggaaaatgtgagaaataagcttgaatcttagaacattttggaaagaaggtgacagtcctttagtcactgtctcccctctgcactagcagtggagggttataaaaatacccagtggggaaaaaacacctaagtagagccttctagttgatgacggcttaggaatcacccgtctattgagatatcaccactattgggaatgacaaggcatttgaaatagtatctttaaaaaaagagagcatgaggccgggcacagtggctcacacctgtaatcccaacactttgggaggccgagacaggtggatcacccaaggtcaggagtttgagaccagcctggccaacatggcaaagtcccgtctctactaaaattacaaaaattagccaggcatggtggagcacacctgtaatccctgctactcgggaggctgagacaagagaatcacttgaactcaggaggcggaggttgcagtgagccgagattgtgccactgcactccagcctgagtgacagagtaagacaccttctaaaaaaaaaaaaaaaaacgtggagcgcggtggctcaggcctataatctcagcactttgggaggccgaagagggcagatcatgagatcaggagatcgagaacatcctggctaacacggagaaaccccatctctacaaaaaaatataaaaaattagcccagcatggtggccggtgcctctagtcccagcaacttgggaggctgaggcaggagaatggcttgaacccaggaggtggagcttgcagtgagccgagatcgtgccactgcactccaacccgggtgactgagcgagactccgtctcaaaaaacaaaaaaaaaaacaaaaagagcataatgttggccaaaatgtatactgcctgttttataaccagtatgtatagtcacggccttgtggcatgggaccgtatgttaaaagtcagtcatataccttgaaagaaagcaacactgcttcttaagagtactgaatatcatgttgcctcagatgttaagcagcagaaaatgtaaaggatgtcctcctaagctctcaaaggatttgaagtttaaatgaaatagaagagtcatgcaaaccaacttatttgactgatactgtcacagaagcaaagtttctttggaatatacatacacacagtgtatgtgtgtatcatgtacatatatgtatttgtgtatgcatgtgtatatgcttgtatatatttgtgtgtgtatatatatagtcccagagtcttgtctgacctttctcctacctccactcaaactgcatttcttttcattttttttagtttaattttttttgaggcactgtcacccaggctggagtgcaggggcatgatctcggctcacagcaacctccatcccccaggttcaagtgattctcctgcctcagcttcccaagtagctgggattacaggcacgcaccaacaagtccagctaatttttgaatttttagtagagacggtgtttcaccatgttggcaggctggtctcgaactcttgacctcaaatgatctgcctgccttggtctcccaaagtgctgggattacaggcatgagccgctgtccctggtgacmaactacatatttttaatgcataaattatacattttatattttacaaaactgcaaaagcaaatcctaaacatttggttaagatccttctgcactctcctcccgtgacaaaatacagttatgatttcttcactccattaaaataatccagattagaaaatccaggcatctggatctccatgaattctttattttgtctttatttttgtaaagaacactgtttacattagttgctgcaaatagttccaaatcctttcatatttattataaatgggtttaattactgttatgtgaaaacagggccagtaaataaaccaattctt

SEQ ID NO: 94049 - DNA, 101813 bp, Homo sapiens
  misc_feature (1)...(101813): n = A,T,C or G
gtgggaagtgtctggcatgatatctggttcataggaagtgttgcttctgttgtttagctgcataataagccactccaaagcttagtggctgaaaacactgatttattatttctcatgattctgtgggccaggaattcaggcagcactctgatgggcattttatctgatccacatagtgtcagctgcattcagctggtggctaaactgggttggaagatctgagagagctttactcacgtgactgtgcctcaatgttcctccacatgtcttttcactccctgtggctggcttaggttgggttttttcacagcatagtggtctcaggatttcttacatgttgaccggtttttgagagcaaagagaaattgtccagtcctcttaaaggttcagccccaaactggcatagtgtcactctatgacagtccaatggagatgaaacaagtcataaaaccagctgtggttccacttcaaggggaaatagtctcccctgtaaaccggaagaacagcacatgcctactgagggcgggaattacggcagccatctttggaggtgaccacagcgctcaagtttttattttcctgtgctttggtttgctgtcttgcctaaaaggcatagcagcatctttgacagccaacagcatgctgtagggcagagtgagctgtgggaactaaggtataggtgtggccttgaggctattctaacttggcacctcaatcatttctcttaaagtcaacaaggtccaatacattttctcttaaagtcaacaagggtccaatacattttcagtattgccattctgccaacaacgggcactgacttaagcattccatctgctttgtattttatctcatgtcattattgttttgaaacatgttttaaaaaaatactaaaacaaacatagacatactatttcaatatgttgttttcccttttattaataccatggaaaaaagaaaattaacttgatcaaaaaagtgaacccacactggcttctatatgtgagcttttgttttttcttttattggaatgtctttctttttttccttcttttttcttatcagtctacatcatgctttgaggaacgtattttttttttacctcctccccttccgtttctgagggtaaagcagcacttatttatctcccaaggctcagcttccaagtcacttcctttatgaagcccctattgacacatctgccaccaggtaaacttgatcactccccttttttgtggctttactgtgccttgaaagcttccaccttagtaaccacaacttttatttgcactaatatatttacccagcctaatcaggttactgtatggctgatggcacagggaaacgaattcctaagtgcctaccatgtgctacatgggggcacacaaagcagcatcgttgttcacacctggaatgttatttgctcacatgctgcccacccaaactgtacccatttcctttagtttgcctcaaatgccatcttttccaagaaacttttctgaatcattcccattagtatgaaaatcccatcttccttaaatgtagtggtacctgcatttctatttaacatatttcttgtattatcattatttacttgtattatagttataattatttacttgtattatagttttartaattataattatttactcctctcctcccccagagaactgtgaatttctcgagagcagaagcagtattttattccttttttttttttttttttggttctcccacagtgcctagtgccttgctctttgggagctcattgtttagaggagaaggtcataaaatacatatttaaaatacaatcttaacttcagggttagagatctatacagggcattgtgaaagcactaagaagaggtaactttaacctctgtggcttaaacacataaggggttttgtttggcagaaggtgccctagagcttttggtgacttgggagtcaccaatgtaattatcttaaatattcctatttcagcataagtcattttggtgctgaattcatgtagggcctcaggcataattcgcatggtctgagagaggggaagagagctgcggtccatgttccttagagaagatggggattttctatggataagggctttctcattctgccatgaagtggtaagggccctagctggggttagggcgtccaagaaattggtgaggtgaagataagagcactgtactagactgtttggtttctttgcaggccagagatactttttttttttctttgaagaaaaagataaaggcaaaaacagcatttgagcaaataaaaattatccttgaactcacctttacttgatgggctactatgtctgtttttgataacgcctaaatctttcttctaggaaatggcacgtgccacctctactcatatttaattcgtcaaagaagtcacatggtcaagcagtgaaggggcagcaaatgatagagacaatgatgtcatctccaatgactacatggagccctagtcgtttgtttctgaagataaaagaccaagaagaggtcaaaaaaaaggaggctcgtaaatgtaactttaagcaggtgaaataaaagattaatcagttgaaaaaagtaatttaaaaggaagaagtaaatttttttatcaacaaagtttgaaaccttcagaaatcaaaatatatataatgaagaaaattttgctgtctttcctgacaaaagaaaaactagacataaggaattaaacaaccataggaaaaagtgccttacctgagacataagcctagagaagtgcttatttttagtgtatctgaattggttttggcagtcacagatggcatttaagggagcaaatagatccgcaatgagcacttgcatgattcggcatctttgttcacacctgtaatgttatttgctcacatgctgcccacccaaactctgcccatttcctctagtttgccccaaatgccatcttgttcaacttttctaaatcattcccattagtatgaaaattccatcttccttagatgtagtggtacctgcatttctatttaacatattaatattgcgtattgccttgtattataattatttacccctctcctccctccagagaaccatgagttccttgagagcagaagaagtattttattttttatttttggttctcccacagtgcctagtccagagcagcgcacatgaaggaacccaattcattgctgttgaagtttatgaattacagtttgtataggagccacgtgacatgcatatgttagctgtacccttgaggtgatcccagagcataaggtgcacataagaggaggtcaaatttatgactctagggcctagactcaccgatacaataagaaagctttggtacggtagacaagcagtgaggaaagacaggagagggctgtctaggttgtggactctgggaagcgaccttagtactttggttcctctgacatctagattagtttgtcccttttagatatttctatttatattctcttagtatcaaatggtagttagttatataggtcttagttttaataaattgttctactaatatggtttggtcttagctatgcaagcactaaatgtgagcaatataaagttaatttaagggatcaaatataatattaggctgaaagcctattaaaaattatagaggaatatgtggaagacacattcataatacagagtatgaatatttttagattctctgktattggatttagatgtgcttgttctattttgtaaaacaaagaattgccctatatctttgatctgtgtgtttagatttttttagtgacagacaccttataataactagaaatagaaattccatctttggtggtaatatagtgcagggacctgagaagagaaggtcttaaggtgctgttaattagcaaaaatctgaaccccacagtstcaaagcaattaaggctgttaattgaatatttggrtgcttagaggattggctcatatgtggctggacagggaaccctaggcttgcatacaggagttacattctacaaataatcatgaacaattcagaaggagcaaatataggccaatgctagtagtcaactgcatatttgaatagtaatacattgctggctatatgcaaaattgtctttttactgtaaaagtaaatactaataattcwatctttcagcctatcttttgtaaatatggcacagtatttattcatggaaaattcagttttttaccatggtgattgtaccatcctctggtttgataaacatctctatgattcacctgatattttaaacacagttggtggtcacacaatggctacaatgtcatacttaggcacatttgggggacagaggagaaaggccattgctgatgagctcagagtggcagtgcttttattatccaattccttcatagcctttgtatgggcttccttagctgtggcatttaattaacgtgtgaacatacttctaaaaagaaacttaaaacaaatagaagattacaaaaaagttttcaagaaaggaaaaataaatgttccttttagaagatcttcagtgaaaagtagttaatattttcagtagtgcttattatttttaatagctctggctttggggtaggcttctgcttctgccagtcccaggcttgcaaagatgcaaacgaccgtccactaaagaacacccagaatgcagtgagtgaaaaatgaatttagtttctcaaactgtttcagtcctctgcacagttaaggaaaagagaaattatatgaatgcttaaaatccaccggttatcctccaagctaatgttggccagtagttttccatatatttggttaaaccttccagaaagtggcagaattgagcgagttgagggttccccccacttctttccatctcagtgtactttctggagcagtttgtaattttttttttttaaaagctatgaagtgtctttttaaaaagtggaggtgcttagcaggcagtaaaggatatgagcactgaaactaaacattcccaaacggatcatttccatccttatttgaggaattatgcattcataaggctggtgtgatttaggaacaggttattcaaagtgcaaatagatatcttcatgaatgaccagagcatataaaaaacaaattgtacttaaggtcctaactcgagtttattgtgcacatatatcttctaaaaatgtggagttaacctacttaggggttactgaccagggcttttaaaaggcacaggaacagagggctgaagtcgttaacactagactgagaagcacgtttaagggtaacaatgccacctctttggatcagaagagttcctgtttgttatgcaatgtgtgcacttcattatttacacgatttcactaggtgamtgggagctgtgtrcacagccaggtgagcctgcagcagcgccccagactctgacagcgaacaccctctgtctactgccttctgctagccctgctttgaaacaatacccttttctggaaaaaaaaaaaaaaaaaaacacaaccctaaatcatagctacttctctagataacaaccattttcttttcttaaacgtttttaggaattaatagaactttcttggaaaaatttccaaactcgtttccactgcgctgaacggacgatttaaaaagtaaatactcagaagatactaagaagattccgctggagagtctctttttattgtgttacggggtctcctagccctctcctttctcctacccacggcagcccatctctctcctccaggaccccttctttttggtatttcctggagtacggatgaaaatgaataggtgagcagcctctgggctaggccaggcacacargggtcccgagtgaccttgggagacttgcgggcttctggaaggaaggctcgggcggccaagcaggagtcgccgcagcgaggaagcgccaggaggcggcgggggcgaccccgggggaagggcgggcggggatgcgccgaggtttccgtgacttgggactagtcgccccgaggcgcattctaactgtcggctcccctggccccaacggccagagagagaagggggcggatcctcgcgtaccagacacgccccggtcgggtataaaattcgccaggcgctcgctccccaggccacagccgctccctcgctctgctggggcctccggacgcgcttcccacgcgggtctctggaacactcggtccgaacgcacgcctgcttgcactcacactgcggttcacacccggaggcgctctcgcactcacactgccgctcacgcgtgctcacactcccccacgcgcgctccgctccggctccagccccgcgcccmgcgaaggcgcaggcactgctgccgagagcgccgaggggccccgcggccttcccatggcggacctgagcttcatcgaagataccgtcgccttccccgagaaggaagaggatgaggaggaagaagaggagggtgtggagtggggctacgaggaaggtaagtggccgcgagtcggggtgtccggggtcccgcggcggcgtcagtgtctcgccgagcgcgggactcgagtcctgctgccgctgcgcgctccgagcacccccacgccccctctttcccacgggggtctctgccactttcccactcccctggtgcgtttcgggcgggaggcgctccagggaggcgtgctcgccgcctgcgctcttccgccgcctgcgctctcacccgggagccttccgcagggctggcgttcgcacctgctgcggtccggagggcgggctagcctccaagccgtggctgtaccttttatgtcttctgagtagtcaagaagagcagcggtacattttactaaacacctgaggaagacagtgttagcgtgaagaattcgtttttggcttgragactttggggagaaagtgtttctgcctctggtcttttcgtgaagcctgctagcaaygctcaagtctttctaaaacatgtcctaaatttcagactgaatcattgggtttggcgagaagcggttgactttctgaaaaactcgagtttcctagatttattcctaaagacctagggctcctattagagccaaccagtagtgctgatgtttactacatatgttgaaaccaatatagaatatataattttaattataaaaaatttggaaagactatgggaatatgtatgtacacagatatatacatatgcacactttaaaatactacacttgcatttctgataaggggcgtctattyactagcatgagagttagggttctgactgtcactaagtatgttgaaagttacagctgtttcccaggtactgaacgtaattgaactaataagcagaagaaattgttctggtattcttttttcctaatcacttaaaaatgacccaaatttcctagaatcataaattattatgtctttgttgacaaatacaaatagaatattttgctagtccgggattttgtgtatggtatttgataataacagatcattcaaataatgaatgcaaaaacaaatagaattaccatatttcatctgtatagtgatggtatcattactytcttcatratatcaagggttctaagtgtttagtttttacatgttaaattttactgtaatttattttttaacctgtttttaatttatttcattttgttcttaggtgttgagtggggtctggtgtttcctgatgctaatggggaataccagtctcctattaacctaaactcaagagaggctaggtatgacccctcgctgttggatgtccgcctctccccaaattatgtggtgtgccgagactgtgaagtcaccaatgatggacataccattcaggttatcctgaagtcaaaatcaggtattttagaaaatatgtttgtgtggtcttttaaactagaagtcagcgtagagttattgaactgtgatttaacttgcacaatttaaaaagtacaactgacgtatctctattttcaggatacctttgtattataatataaagcatttttgggaattaccttctgaaacaattttgaaaggacaaaagagtgaaattatgaagattatcagtcggttgttctgcttcttatgatgttactggaaaaaccttagtttgatcaccttataccttgtgaaatatgaggacaggtacatgcaggtgcagtaatctgcrttttgtccraaattgttgattagcttaaatcacttagataatcataattctctgttttgctactttgtgaaaccaaagattagaatttaytgacataacgtggcattcaaggtagacttctcaggttaattttctctactgtattagtttgccaaaaataattttaactaataacaataagaaacagcctctaaactcagccagagatttaaatggtaaacaaacctcttccttttatttatttatttatttatttatttaagttccatcccatgaaacttctcctaccmcttgcaaacctatttgagatggatctgaaatgttctgtgcaaaagttgttaggtamttaccaaggaaatcagtttttggctttatcgtaggaaagaggaaatcagatttttaaaaaatgtagcattaatagcatgcatttcatagtgaataataactgtctttttcttttgggaaaaattaaagtatgttgwaatattaggacgtacttgataaatagagactgtgctcgaaaattaattccaagttgataaagttgatacctcaaactataaaatctttaggtttgttattaatcaaggcagctgttgatttccagctatggatttattttattcattgtaaatgtttctaagctttaatttagaatccatgagatagtcatagattcatgtagtctycttcgctgttctgagtttagtcagcatgtgagcattgcccaaaagagttactgggctttatatgtacttagtcagagtcagtttaagatggaaatttcgacttgaatttttttgggggtgtgggtttagctttgatgggacattacttactgttttttaaaggatattgtaaaattattgaatgctgactgttctggcatataaaaagcaatttaaagaagtacatgtgtgttgatgtgttgagatgctttgaacttccggaaataaatgtttatatatccacaaaacaaaaatacatttcatgtcaggtgccatgatcaatattggttgcatataaatttataagacagttcttgaggattcatagcctagtgaaaagccagttctttaaagtactagtgtacacttgatgtggcaagtgttacaaagggttgtgggagcagagagsaatgactaagcacatatactccactgcatctgtgtgtgcctagtcctgctctgagataaaatttacttcatcaatttgaacttaccattttcttctgctaccttctcaaacaymaattttctttaatcttctgcctcactctaaaacagagactatggaccaacatctgggccctctcaccatgaagtgtgtttcttcctcacctagcattttgtgcttttctcttcctccttcttccacccctgcccactgaagaagaagtgtctgcacttctgtctaggcctgatttggatactcatgatccagaacccttttttccygcctccctggagaccttcctccttcagattccccttatcctctctgtcatggtaataatttcctccttattgttctttcccttccaatatttctgcaaactcaagaaaagtaaccaaaataaccatgtcttgagtagttgttttttcccctaggatatttaagctcctcagaggaatcatttgtaagctctatataccctgtcattcgcttatttaaataatgttttatctttatcaaaatagaatatatacaaaatagttgaataggctgggtgtgatggctcacaagtgtaatcccagcactttgggaggctgaggtgggtggatcagtggaggtcaggagttcgacaccagcctgaccaacatggtgaaaccccatctctactaaaaaatccaaaaattagctgggcatggtggcacacgcctgtaatcccagctacttggggcgttgaggcaggagaatcacttgaacctgggaggcggaggttgcagtgagccgagattgcgccattgctctccagcctgggcgacaaaagcaaaactccgtctcaaaaaaaaaaaggtgaataatactctttctgcctgtggttctttctgcctgtggttatcccctgctcttccccacctayggctgctgttcyctagtaacaactactttgaaactttctagctgtttctcctgtggttacctccaagaatgtaagaatataataatgctgttatgctttggtatgtaagctatgtatgaactctctactattgaagacgaggccaattttctttccttttttttttttttcttttgagacagagtctcgctctgtcgcctaggctggagtgcaatggtgcgtcttgactcactgcaatctccacctcccaggttcaagtgattctcttgcctcagcctccccaagtagctgggattacaggcgcccgccaccacaccaagctaatttttgtatttttagtagagacgaggtttcaccatgttggtcaggctggtctcaaactcctgacctcaggtgatccgcccacctcggcctcccaaagtgctgggattacaggtatgagccacagcacctggacgaggccagttttcttattgccctctttcttatgatttcactctcgtattatcgctgtatacttaaattaattttaaaaatctgtatacatttagggggtacaagtgcggttttgtttcttggatatattgcatagtggtggagtccgggcttttagtgtaactgtcacccaaatagtgtacattgtatccattatgtaatttctcatgcctcattcccctggagtctacttaaattaatttttatttaaattaatactcattatttttattattacaactgcaactgttgtttccagctgagattatattttgtctcacttaaacagtgttttgtattttcctggagttaatgcatttttgttaattgaattttttatctgtcggtaattaatttgcaaactctctaacatatgacggatcttctcttaggacattcgcgtgcatcaggttgtcttccctccctcgctcctccttgtcctttctttttcctgtggaggctgcttttcytttctgctctccaggcctctcctaacagcctcttctcgcagctccttggacctcamgcctgggaagtccccttgtttgtctcctgtgttagatcrgatgtttcctggatgccgtggaagtcccctcgtttgtctcctgtgttagatcgaatgttttctggatgccgtgccatcctcttttttgagttgctccgtcatctyagggaatttcttggtttatttgcttgtacagttcatcttccaggaacttcctgagaaaaggggcaagtgagggctacatgcttggatgcctatgtgtctgtaagtgtctttattatacttcacacttgattggarttagcctggagcggcagtctgggttggaagtattcttgacttcgtttgatgtttgacatcatgattacattgcttgaagcttccagcgttgcagttgaaagatctagcgccgttctgcttctcaaccccctctatgtgtctcttctcttttttcctttctggaaccttttacagtgttttctttactactgttgttttgaaatgttacaaccatatgccttggtgggattgtttctgcactatatgctgggcacttggtaggtttttccagtcaagataattgtgtcttttatttaccagcaattttcttatatttcttatattatttcattgataaattttgtatttttattttttcctcctcttttggtaactcccactttcttcttccctttctcttctactttctagtagatttcctcaatttttaatcgtttagtcttttgattgaactcttactttctgctttcttgtttttaatttctaaaacattgaacttacgctgcaattaaaaaccttttttttwaaaaaaaatacaacatccagtatttatttcatgaatgtatgatctttcttcattcttttctatattgcttcttttctatccctacctgtctctgtttactctgggtttctttttctatttatattggcatccctcttttatttcggaggttctcctcaaaagtccagtgatctttggctcttcgttcctatttaagaatgagtctaggaagcagatcagaagctctgtgcacctgggcagggattgagggctgttgggcttcacagtaccatgatcaagaaaggacctggccatgttgttggaggagtctttgttgcttatattggtttatctggaatatgcttgtttcctgtttgtgtttttgttttrgggttggggatggctcaagttggccaccagctttctggttgttggcacagacaggagactattaccatttagcaagtccacatttccttcatcttctgccagggatctcatcatcatgcctgaccatgcatgatgaggtttaactgctccttttaaaaactttaaatctgtttttctgttttcagtttcctactttgcactgccacattcagaagtatctctaatgcttccacctcctgagtcttttctcgtgtcttagtctgtttggctactataataaaatactgtggagtaggtaatttataaataatagaaatttatttgtcctagttctggagactcggaagtccaatatcaagctgctgacagatttggtgtctggtgagggctcttcctctgctctgtacatggtgcttcggtgctacgtcctcacatggtatgaggcagaagggtcaaacaggctccctggagcccttttataagagcctcatcccattcttagagcagagccctcatccgatttacctgatcacctcctggacatcttatactgttgcattggggattcagtttcaacatggattttggagggggatgcaggcattcaaaccatagcatctgggttctgcggtaggaattrcctgcctcttgtggccttcttcctgtagttacttagcttttagctttctctttttgctgaatcactcactacctttgtctgctttccagcaccacccccctaccgccgcccattattttgggcatttctcttttgctsttgttctccagtcttgttcatgttgctctggcaagttgtgccctcttcatttagtgagaattgaggagggagggcagataaatgttttgagtacaatcttccttgtctaactggaggtaccccctgcaaatacagtgggctgtcttcttaaattaaaaaaaaaaaatccacacaagaagcacagttctttttagaaattaaagctgacttcacaccaccactgtgctaaaacctcagccctccctgaggctgtctttggcctcagttattttgttttattctttatttttgcttagtttatattaacaaatcataaataattgccaaaaaggtttagaacagttgtagtataatttaaatgcttaaacttatcaaactaaaacttctaacataattgtaatgatattgttcctgtatatataatcccatctggagttactgccttaatataaatttgagggttttcaggggcatgagcccctgcccccatccctctctgctggaacttctcaagccaaggtcactgatgaactcatcatcccctaaatccaatgggcatttttatattcttacaggactttaactctgctgcactggaaatggaatttttggaagttttctctcctgttagtctctgggccacacagttccctgacacttcttcctaattttgactgccttttctctgctggtgcttcatcttccactgtgcttaaataacagggtttcttaaggtttccttctgaaccctcttctcctgcatgtaccccatgagcagtgcatctgcatagactgtgtgctactttgttcgtcttctttttccccataagagagcaaaggagcttagaaaaggagccacagtgataggctctctgagtggcatgggccagtgtagcctcccatctcagacccctggcaggtgggtgggcagcttgaatagctcagggaaggaaatccatttctcacaagaaaacccattttgcttttgagcaattccaaaagtcaaaaagttctatgatctccgccattgtctctctttaagtctctggacatatttagaacaaatataattatacttccactttcaaatactgcagtcataacatgcagttgccatttttcttttcagacattcttagttctttcagctgttgctcacgtgacagcctttcatccttcaatacttacttattgataatttactatgggaattatagactcacttgtcttttagacccaggcagatataatactatacatgagagcaaccaggagagcaagagattgtaaatagctactgatcctctgcttcatctgcagtgtcaatagacaagacagtaggggctggtggggactgcaggaactggcaagctgcagagagcaggcctactttgccagatgtttaatgtgtcaggagaaactggagatgtgcacctgtgaactaaacatacgtgttcattggtttcctctggcctgcagggtgaggttggcaatctttgtttcatcttttgcaaacagttacatgctttggataaggtaagtataaatcagatccaaagcctgccctcaaggaggatacaatggtaggtcatggaatatattatagctatacagggagagattatttttggtggaaattcttagggaaggatttgtggaggaaagagcatttgaaataatccttgatggatgaatagcatttggatatggggagcctgaggtgtgtgggaagaagggacagcttgcacaaaggataagatatggaaagttctagaggttgtatgaggaaaggccaatccttcagtatgtctggaagagatttgttcatgataaagggggttaacaggaaatagaatagagagggtattwtggagcaaattcatgagggactctgcacagaggctaaagagtagaacctttcttttttttttttgtaggataaagtcataattagaacattgctttaagaaaatcaagctggcagcactgaatgagatgggatctgggagagagtgtgagccagtttgaaggttagtacaaaagactcaaccaaaaccacaggcattgcagtgtcagtggaaaaggaggggaagacacaggagtgatctctgcgatgcaatctacagaatgtcatgggtcagttatgtggagcagggatgtggaggagatcagtggagagagatggcttggatggagcccccggtttcagatcctgtcactattctacctctgctctgggcaaatttcaaggtagcagagtccctccctcctaacatggagttgaagcaagcatcacattccagggtgatctgaccagactattggtcctattatctcctagagcatggagaattttattaaggctgccacatgtatcatttagcttctcagcaggacaagtgggtcactgtctyaggaatcttgacatttaaggtacacaggcaaattaaaattaaacatctttgcagtggtataaagaggattgtaagcataaaaaataattacagatttctagcctgagtggcttgatacttaagtagtgagaaaatgtgtgagactgcccacacttgtgcagtagtgtcactccagctgactacaagcaatgtcttaagggtaatgacatttttaatsaaccatcattatgggagaaattgccaatcaagataggtcatttgtgcccttcactgtttcttattatagaaactttaattaggatattttatttctgggtctcttgtaattctcaatactaattttaggatagatgatgatgattattaatcctacttttcccccccaaacatggcaactttttaacagtgtttcttggcaaccttgctgatttaaagatgaaaattgtcaaaaatatcttaaaaattattnnnnnnnnnnnnnnnnnnnnnnnnnnnnnnnnnnnnnnnnnnnnnnnnnnnnnnnnnnnnnnnnnnnnnnnnnnnnnnnnnnnnnnnnnnnnnnnnnnnnnnnnnnnnnnnnnnnnnnnnnnnnnnnnnnnnnnnnnnnnnnnnnnnnnnnnnnnnnnnnnnnnnnnnnnnnnnnnnnnnnnnnnnnnnnnnnnnnnnnnnnnnnnnnnnnnnnnnnnnnnnnnnnnnnnnnnnnnnnnnnnnnnnnnnnnnnnnnnnnnnnnnnnnnnnnnnnnnnnnnnnnnnnnnnnnnnnnnnnnnnnnnnnnnnnnnnnnnnnnnnnnnnnnnnnnnnnnnnnnnnnnnnnnnnnnnnnnnnnnnnnnnnnnnnnnnnnnnnnnnnnnnnnnnnnnnnnnnnnnnnnnnnnnnnnnnnnnnnnnnnnnnnnnnnnnnnnnnnnnnnnnnnnnnnnnnnnnnnnnnnnnnnnnnnnnnnnnnnnnnnnnnnnnnnnnnnnnnnnnnnnnnnnnnnnnnnnnnnnnnnnnnnnnnnnnnnnnnnnnnnnnnnnnnnnnnnnnnnnnnnnnnnnnnnnnnnnnnnnnnnnnnnnnnnnnnnnnnnnnnnnnnnnnnnnnnnnnnnnnnnnnnnnnnnnnnnnnnnnnnnnnnnnnnnnnnnnnnnnnnnnnnnnnnnnnnnnnnnnnnnnnnnnnnnnnnnnnnnnnnnnnnnnnnnnnnnnnnnnnnnnnnnnnnnnnnnnnnnnnnnnnnnnnnnnnnnnnnnnnnnnnnnnnnnnnnnnnnnnnnnnnnnnnnnnnnnnnnnnnnnnnnnnnnnnnnnnnnnnnnnnnnnnnnnnnnnnnnnnnnnnnnnnnnnnnnnnnnnnnnnnnnnnnnnnnnnnnnnnnnnnnnnnnnnnnnnnnnnnnnnnnnnnnnnnnnnnnnnnnnnnnnnnnnnnnnnnnnnnnnnnnnnnnnnnnnnnnnnnnnnnnnnnnnnnnnnnnnnnnnnnnnnnnnnnnnnnnnnnnnnnnnnnnnnnnnnnnnnnnnnnnnnnnnnnnnnnnnnnnnnnnnnnnnnnnnnnnnnnnnnnnnnnnnnnnnnnnnnnnnnnnnnnnnnnnnnnnnnnnnnnnnnnnnnnnnnnnnnnnnnnnnnnnnnnnnnnnnnnnnnnnnnnnnnnnnnnnnnnnnnnnnnnnnnnnnnnnnnnnnnnnnnnnnnnnnnnnnnnnnnnnnnnnnnnnnnnnnnnnnnnnnnnnnnnnnnnnnnnnnnnnnnnnnnnnnnnnnnnnnnnnnnnnnnnnnnnnnnnnnnnnnnnnnnnnnnnnnnnnnnnnnnnnnnnnnnnnnnnnnnnnnnnnnnnnnnnnnnnnnnnnnnnnnnnnnnnnnnnnnnnnnnnnnnnnnnnnnnnnnnnnnnnnnnnnnnnnnnnnnnnnnnnnnnnnnnnnnnnnnnnnnnnnnnnnnnnnnnnnnnnnnnnnnnnnnnnnnnnnnnnnnnnnnnnnnnnnnnnnnnnnnnnnnnnnnnnnnnnnnnnnnnnnnnnnnnnnnnnnnnnnnnnnnnnnnnnnnnnnnnnnnnnnnnnnnnnnnnnnnnnnnnnnnnnnnnnnnnnnnnnnnnnnnnnnnnnnnnnnnnnnnnnnnnnnnnnnnnnnnnnnnnnnnnnnnnnnnnnnnnnnnnnnnnattgccaagcgtattaaagagcattaaagaaaatggaggctgtggcaatggcatcagtttattttatattcttttcacaagttccttttctaaaaaaattcagcctgtcatcagtaggagtttcatgttctttcattgtaactttattgaaccagatgacatcataactaataaacctgccatgtagtgacccaatatcactcagcaaaatttgattttcataaatgtaggaaaaggctaccccttctgagatgatttgtttttttatttaaaaaaatgtaagcagtaaaaagggagaataatgctggaagagggttaccagatggataaaatagaagctgctatttatttttagtccataaacacaatcattcttgggggatgaacaggtaatgctcttacctggcacctcgtaaaactctgaattgagaattttgtcattttttatggcattgtatggctatatgactttagtgtggtttattttggattattcatctgcagcaacagtgaaaggtacccagagcctggttcctggctgacagccacctctttgtcacctctccctggagaaccaggctggggcaaaacacttcccttctcagtgttcctttcataccatagaatataattactttattgtaattgtattgactgtcatgacatgacagttaataaacctgtgtagtaaccagataggactcagaaaaaatatgatcttgataaatatatgaatttacacttcaggataatagaatgtaagatctacaaggccagggaattttgtctgttttgtcaaaatcaatgtattctaaatacttaatacagtacctggtacaaggtagtagatgatcaaaacaatatctgttggaaggattagtaaacttccctggattttgaagttctccctatcaaaacatgggtctgtgcagtttgaatttccacagtgtttcacttaaaccgtctccaagtttaagtgaaagggttcattgctgttaaggaagttttgagcattggtcatgcggggagtatatttttgaagcatggatctctttatggttccctgaaatcactgtcaagaccagctacaagctgtatcattcatttccatatgacagtacttagtagactgctgtttactagtagaactagtaagctgctttgtaacagagcagttttagaaatactgtgtgcctttgtgtgtgtgtgttctgagtgtatgtgataaaggggttttggggaaggagttttaagaatcctctttcccatttcacatgtgcttcatttcatgacactcctctttctttttccttagccacgtggagctgagccttttctaggacagttttatcactttgttttagaagtggagttatagagctcacctgttgaggccttgggtcccactgttgctgggggtggcaaggggtgtattttctctttctcttttttcattttggtttgggaggtggggtacacagtgggtagactcctggtctccttcctggtttttcttaagaccaaatttggacagccaagagaaaggaatgagttgtgaggttgtttagaaacgtttcatacattcttaaatccacagaatggatgtttattgaagaggaaggtgaagtgagcttgcactgtggttctgaatatctacaaacctttctgatccatatattaaaagttttttagattgttctgggaaataggatgaagtgcagttctccaaggagcaacttcactttataaatctaggcttagataattcattgttttttagttcatgctcacagatactgaaatttgggtttccctatccctgcctcaaccctgggatgtgggtcagaagatttgagttccagatcctgtcctggagcctgctaggaggctgactgtggcaggtcacattcagcccctcttcatcccgcttttctgccctgtctgtggagttgatgatgagactatccccttggatttgttgtgtgacctaaatcagaccaagcatgaggacaaacactaaaatctaaaatcatacatgacagtgtgatcctaagggccatgaatctcacttccctttcctgttgatgtgaagtgtatccactcaaaaaattaaagttacttcttgctctggatgttccttgtcttcgttgtttgagctggtagaaagcttgggagtagatttgtagggcacctttatcaaggactccatgacctccattgtgtctaatagcctcatttctccatctattttctgcctctttcttggcttccccttgttcttcttcctaatttatgctgtctgactgtattatatgtaccttgacataagcagccttaaatcctttttgaaacaagtcattagatgaagaaccaaccaaacaagtaaatattgttgcaccaatttgctttcttctcctttgagtttttgggtaaggatgaaagaactcttcctcgagagaggtgtggaatctgttatgtcctcctcaaaggcaacccaaaaggacaatctgtttcaaaaagtctgcttctaggaaagatgaaggtgttgaattttgttagctaaataacctaaaatgcttagctgatactgttcagaattgggagttgctagaggaaaaatgccctgagttaaacaacttttatttgtattgaaattgaccatttatttgtaggaaactttatttcaagtttgtacatatgctgtcagggagtttttaactaaataattttattgttttaagacaggttctcatgcaaatgtatttttcattatcctttagtgtgctcttgttggggataaaggtcttgatcatatccagcaatgagaaatagagacatggtcctgtgggactgatgttaatattttgaggattgttaatattttattgcagttttattttgtgtcgtttgtggtaatgaatgtccatcagctattaaagtgtgatttcattattgattgacttaatgctaatcaatcctcttcatggataattttgttagtccacacacccgttcgctaaattggaagccttctagtacaagtggatgatctgcaaacgtggtttaatttatttagatgtctacagaatattattggtcagtcagagagtcaaaccatatttttgtctcctgatcagtgctaagcttaaatctctaagggaggaatttgtttttcttgtctacttctagactgaaaacacacaggaaattaaaatatgcatatcattatgagtttttcagaggttttgaacttccgtgtctgaatggccaatacaagaatttcagccaagcctagatagtttaaattcacctcacagttgtgataaatttctcattttggctttgtgaatttaatctgtagagcccatgagagcattttggtggaaaaaaaaaaagtctctaatgtttataatgctgaggtaaatgtgtgctgtaattcggtaacatatattttctttttcagttctttcgggaggaccattgcctcaagggcatgartttgaaytgtacgaagtgagatttcactggggaagagaaaaccagcgtggttctgagcacacggttaatttcaaagcttttcccatggaggtaagaataacaaatcatcttgtaaaaatcttgttttctgaataaagtattcagcgatttactgaaaatgatttagtttaaaagtagatgcatagctcttgaattttatcagtttatactaaaatttaaaaaatgcttaatgcaatggaagcctagggcagcacatgaaacctcctgtctactctcgtggcttggcgtgtgcgcatgagcacatggccagaaaggcaatctacagtattaaatttcaccctagtgttactattcttgtaaaaattctgcctctgcaaattcagtaggtcatttttgtggatgctttggataggtgacgagctgaagacaagcaaccgttggagaaacctcaacagtaatgaaaagtgtaggtttgctagtttaaaattggtgggttggttttattcaccccaagccacttggggagggagggagaaagagagattttttgagagtgattcttttgtccaaagaattccctccccgacttacgttcttagttaacttctgctgtttctttgatacgcagttgaaatcttatgtcttctgtgggacttttctctagttttttccctaggcagaattcatctctctctctctgctccctgtatgcttgatagggcactgccatggcgctggccccatgggttgtaccatttagtctccacagcgtctttcttgmtgcctgtgagctcctgaggaccgaagctccctctcaccccctttttactcccatcatttgcccactgccaggcacagtggagatagacagttcacactggtgaaagtgaggggatgttggattcagtccacgtcttgatgttatttctagaaggaacctcagtttaccccagaaaatagccctttggtgtcatgtaagagtatgttctgggggctgctggtcttccagtctttttttttgacattcacaactgtgcatgtgcttaatattaaatataaaattgctcatgaccagatgcaatatccagtaccacttcagtggctggaaatcatggctgtataattctatgtcagtgatacatgtattttagagtattctgttgaagtgtttgacagcattactgtaattataataaaaaaatctctggaagctcaggatatctctttcattaaaaataaaagacgtgaaccttagaagtgaaatgttcatgttttaaggctggagagaagaaaaccaaaccagcatgttgaagagtggaggaggtgtgcagtggtgtggacagtaaggagaagcactttctcaaaggccttgatggggaaggcccccagagcttacctgtctaggagctgtttgctcagtgcctatagacatcctctcctttctactgcctgtgacacttctgtgtcacctctctctcctgtcccatcctcagccaacctgacaaggaaaaattcataccagaatgcatcaaaaaggaaagaagacacaaaayaatccaagacagttaaccccactgggtcgcgggtcacaragtgaggggcaggaccaccctggactgtcarcgcctttgccctgcctccctctttgggtttgaaaggccatttcatcatttcatctcagcccccaaagacagactctagtaacaaaagttctagggaaaggtagctgtaaatggggaggcgagaacttctggatgagaattccatggctttgcttgtgacatgcagaacttaaaagctgtaggaaacgtaattagcgagctgtgctctttgctctgtactgagatagcatttccggaccgaatgtccagactggtctggttacttggtgacgtttcagcagctccggtccattaagcacaggtaatggtttgttttgartgaagattaaatcctggtagtgaggctttgtttctgcagaaatatttgtatttaggataatggaattgctgactatgatttttccaaaatatgtggtgaataatatttatattcttttttatcccagattatccctgatccaattccagagaaaatacttgtatcagtcatccagtgttcacttagtgctctatcctgttgagtgcataaatgctatggttatacagaactagaaggagatctctgcaagccaggattgtttattgatatatttttgtggagactatgaaaactgaggtgggttctgaggaggagagggctcttgtggtatggtgaaagagaggagagagggtttccatgtggaagaacatcctgggactggggacgagttggctcatacaggggactacaggtcccctggttctgaactgccaccaagggccacctcaagcacaggggcatggccagcagcacagtgtagagtaagaccaggtacccttttgggaacatggttttttttccagtgttttttgttttttgktttttttgaggtcatgttccatattttacttacattttaagactgactttttttttttctcaaaatcacacatccatgcacctttttcttttttgttgatttcattgaaaattaaatggctggcttgttagacagacagacactataagcaaatacttactctgtctgttacatggaacacacaggaattacctttttttttttttttttaagatggagtcttgccctgtcgcccaggctagagtgcagtggcacagtctcggctctctgcagcttccgcctcccagtttcaggtgattatgtgcctcagcctccatggtagctgggataataggtgcatgccagcacaccaggctaaattttgtagttcaccatgttgaccaggctggtctcgaactcctgacctcaggtkatctgcccgtctcagccttccaaattgctgggattacaggcgtgagccaccgtgcctggccaggarcagcttttaatagaaatccatcgagctgtcttccctcaccttttagaaattataaatataacaacagccctaaagagatttttgatactcccagtagtcagcactgacatggtttcaaaacttaacacaatttgggactttaaatggtttaaactgctgctctacactaagcaagatgtatttgtgtttttccttcttgatacctgtaggtttcagaaacacacatctttccacagccatctgacacactgcttatcatgctctcatctggtaaatctgaattctattgtgaatactccaggtttatgcttaaatgacagtgccttagcaagagaacgatataatcatgctgcatttttcctcctgttacctgaaagggtctcactatgttgcccagagtacatttgagctggtctcaagggaccctcctgcctcagcttcctgagtagctgggactatatttgtgtgccactgcacccagcaccagctggaatccttttccataatgtgtgggtgttttgcattgtgatattcagtcaagacattaatgtgagtagaagattattgatttaagacaagtttgagttcaactaaaattaattcttgtgtgtttgttctggtggctgtggaaagctccttattttctttgaactttgttggatgtcttagcttgtgaagtctaactttaatgctatatgatttttttttttttttttttgccattttgctaacacactagtacactctatgcattcaccattccactggaactgtttattcccttcacattaacttcagatttaaggctcttgggtatttaggctcacaggttcacattctgcattcaggctgtatattctatgtgtgtcatttgtggacactgccatctttgctgcttcaaagtagcctaactctgtggactgtgtaatttttggtaaattaggatgaatttttatacacgaatagctactctcataattccagggaagagagcttctcaggcatttagatttttctggatcagtgcaatttacaaaaaagtggggctgggcacagtggctcacacctgtaatcccagcactttgggaggccgaggcgggyggatcatgaggtcaggagattgagaccatcctggctaatatggtggaaccccgtctctactaaaaatgcaaaaattagccgggtgtggtgacgggcgcctgtagtcccagctacttgggaggccgaggcaggagaatggcgtgaacccgggaggyggagcttgcagtgagccaccatcacgccactgcactccagcctgggcgaaagtgatggggagaccaacagtgtgtcaagttttaatttttccagttaagaacattactctctgctgtcttcatcattttataaagagaggatctttaatagccaaatgtaggaaggatgtgatctcaaaataaggcatggactcataaattggatagatttaggtttttaaaaatgtatattatttaaatttttcttgcatcactacagatgaatgataattttgtcagggataggcactgatcctgcccacagactagcaggagatcatgtatggggaacctgactttcttgccttctgggcctaaaagctatgattgaagagtgaattgccaaraaggaggtctagccatattgtatgttggacccttatctttctttatattgtatttaaagagcatctgttgctctgtgtactctgaaaggacttagtgatgattgtgccacataccagctgttgatggaaagttgggtgcattaggtaaatagaaaaaaaattcattgtacagggcaagatgctttaattgtgaagagtccaggccttggttgcaaaataggccaacaaaaatattctgaagactttatctcgtaatatattgctaatccttaaactatatttggccyctgtgccaggtcgccagatatcccacatttcttcttctctttccaggcggcacatggtagcatctagtatttagtgttctcttagtaaaagtgaatggtctttaagattgctgctccccaagtcatttgcatgttcacctcccagaaagatttatttttattcatgtattttactattctaaggagatcccaggaagagtttgcctggttaatagtgaaattataacctttcaagttatttaactttcaggaacatctcaaatagcacttcatgtttgttgaacctcttctaaaataagggatttccattgattttccaaggagatgtaatgggatgactttagtttgagagtgaacattctgaagattagatacaagatatatcactaaagaaatatagatttaaaaggaactttcaagatcatctagtccaaactcctatctagcaaagaagaaatctaagagttcaaaaggtcaaattgcacaggatcatttataggaaaccatatgtatggcctggatgaagaagagtatcatctggttaattaaatatttcatttaaggattatcctctatggtgctctttttgcttatggtttagttgcagagagacaacacaatgggctttgtccttgcacccyctaatgatataaggagttttgatgtctgtaagcaccccacattcagaaggggactgctttcaccttccacaggagggtggtagtgaggctgtggcaccctgcccctgccttacaggctgtgaagttagagtggctttgtgacagcagaggaggggtgtgtgttgcaaagttggaatccctgctacctccaagaatggggtcgaaggggtggtggatttagtagatagcctactcctgcccactttacagagatgcttactgcggtctggggaggagggaggttagctcagggccacaacctcagaaatggcccatgaactgacttctgctctaggcagtgctttttttcaccttccacagacaattattatcaggaaaatcaactctagtttgaaattttatttgcagctctagttaatactttggattgaggttgctttgggagtaaaaagaaaggtttgtattaagaggagttaggactgacactaaaggaaatgatttgaaatttgaatgttcagctcttctggaaagtctcattattttgaccagaaaaaaggaacaacttgtctctaaatgtaataattattatgatgatgattatttggtatcctggaatctcctatagagctagcagattgagcctgtgtataaacagatgaaggcgttagagccttgtgcagtggcctctccagaagtcatgattgcagaatctccctctcacatcttggcaaaaaaaaaaaaaagcaaacaaattttatgtttcctgaattctaatgaacacttgcatttttacttcataaaaatcatggtttctgctttgattcagcatatttatttttacatttcatgcagaaacctcacagtttactgagtagaaaataaattacaatgttgaacaaacagaaatgttcttttagctgtattccctctcagaagtgaataaggccaacttgacctttgagaagccactttgaagctacctttgattttatatttgttagtatttcttttagtagttcattctttgccattgtttgaggatatacaaaaggttgttttggcaaactaaatttgcaaaaaagcatttatattatagctgattttatgatagaaggcagatttgtagaaaaactgaaaattagttcctataatatgtaattaatgtatgggtaaggttatagatactgcagtagaaaatattttcaattgggttctgacagatctaaattctgcagtaaaatacattttctgtcaatatattttcagataataaatagcytctgatttgaatatatagtccataactgggtggccatctaaataactcatatccatgtattcattcttttatttgtctgtccgtccacccatccatccatccaaagtatttcatatttaggccctggactaagtgctaaggagacagctatgagtacaatagacaactcagggagtttttcatgcagtgggggagttcgaatgcaatttgtgatttttctcctactcactttttttctaaatgggcgagtatttagaacaggggtcctgaagtcctgggccatggactggtacctggcctgttaggaacctggctgcacagcacaaggtgagtggtgggccagtgagcattacctcctgagtccgcctcctgttggatcagcggtggcattaaattttcataggagcrtgaaccctattgtgaactgcgcatgtgagggatctacgttgcacactcctgatgagaatttaatgcctgatgatctgttactgtctcccatcacccctagatgggaccatccagttgcaggaaaacaagctcagggctctcactgattctacattatggtgagttgtataattatttccttatatattacaatgtaataataatagaaataaagtgcacaataaatgtaatgcacttgaatcatcctgaaaccatcccctgccccctgtctgtggaaaaattgtcttccatgaaactggtccctgatgccaaaaaggttgggcactgctgctttagaagatacagtagtacccccttaactgtggaggatacatttctagactcccagtaggtgcttaaaactgtagctagtaacaaacctatatatattaatagttcgttttttcctatacaaaygtatctgtgataaagtttaatttatgtattaggcacagtaagagattaacgagaaccaatamtaaaacagamcaattataacaatatgccaacatcactacttctacactttaggactgttatttagtaaaataagggttacttaaacatgagcactgccgtggtaccatgacagtgaatctgatctctgagaagactcttaagtggctgatgggcagggagcgtgtacagtgtggagacgctggagagaggaaggattcatgctctgggcgagatgtagcagcatggcgtgcgatttcatcacactactcagaatttaaaacatatgaactgtttattwctgcaattttccatttaatatttttggaccagagttaactgaaaccacggaaagcaaaactgtgttactgtaacattgaaaagacctcactcacctaacctgcctgtgcagtatgcagattcaggtcatcagaagctaattagaggaagattttgaagacatttcttagaatgcaaatacattgtttgagatgtgaatgactgtcaaccacacaaaatatttatcaactactatgtgraagacattgtgctagatataaccagtcacgggtcactgtaggctagactaacttaagtaacccaacaaaatgagaatcagacacagggtaggaaaattttcttgatggggaagagttaagaaaggtgtaggttctgaagagacgctagagaacctgggacccctgtgacatcctccctgaggactctggcagtgtgggaggaagtctgaatgatgtagttggtgaatttagggcccaaagttgaaaaaaacctagatttacatctaacctctgcaatctcaggcaagctagtaaacctcttccaacctgcctataaaacttatctatgaaaaagggctagacattagctcagagktcagcgaagagtaaaccctgctgtgtttcctgtttttaggaggagatggggaacatcaaaggtgggattgggattgtgaggataaaaatcttgtcaaaacatcctgagggggatgcaaaaagctttttggattgggcgycagtggctcacgcttttaatcccagcactttgggaggctgaggcaggcagatcacctgaggttaggagttcgagagcagcctggccaaaatggcaaaatcctgtytctactgaaratacaaaaatcagctgggcatggtggcaggcccctgtagtcccagctaccggagactaaggcacgatatcgcttgaacctaggaagtggaggttgcagtgagcagagattgcaccactgcactccagcctgggtgacagagcaagactctgtgtctcaaaaaaaaaattaaaaataaacaaataaaacaaaaaacgttttgttactataaataagaaatgcagagagtatgaatggagaaaataatgtaaagtcttcttttttctttaaaacttcttccctgtttagtcgaatatattgtatttttataagtctaatcaatatgacatttccaggtcatttttcctgacacacctttttattatgatgattatgcatgcatatacagtaaaatttgttttatcactgtattttgcaaggaaaataaatattgccttgagaaagataattgggcaatactatgataaaacttctaattgagtcaaatgatgataggagattttaactctgtaagtttttaacctgtgtaaaaaccatatgttttgcttttttttgtttttttctggtatttaagattgacagcttaaaatggcacagggatgttagtaagatatttgcgcccttgctactgctttgctgtgcttgaatacattttctcttttagctttgtagggttctacacaccaaaaattcgtgacagaagcctagaacaacataccgtgagtcctctgagatgctggacctttttctgacatggttccctaggcaacagcctactctggcaatgtaaattcttagtcagggagagtggcattttgcttgcagttcacaatgacatttgttttctgactgtttaacctcaattccttcattagtacataaggatattaaaattctacctacccttatacaactcaggaagagactataaaaattaaycgtttaggccgagtgtggcggctcatgcctgtaatcctagcattttgggaggctgaggtgggcggatcacctgaggtcaggagttcaaaaccagcctgaccaacatggtgaaacaccatctctactaaaagatacaaaaaattagccgggcrtataggcacgtgccttaatcccagctactacggaagctgagacaggagaatcgcttgaacccgggaggcggaggttgtagtggcctgagatcgcatcattgcactccagcctgggcaacaataacgaaactctgtttcaaaaaaaaaaaaaaaaattaatagcgtaatgttggaagcaccttgcactgagtttctcatgtaatggtggaaaatgttgttaaacaaaagctgatattcacttgaagtgctttctaaaaacattttaagagcagtattaggtatattggatgtaaatgttgtaccatagggcagtatagttttgttctttaagaaacctgaaatgaatagaagaacctgagtttaagttgttgaaatataagcattaagtacagaaggaagacatttattctaagacctgacaaatgaaaggtagaccctttttcatcaattaatgtcttcacttgggaacccaaaggcaagtaaattctctaaactcagcttaatgaatcacttaaacctctggatgagagtttattcagtggaaccagtttatttggctccagagttaatgcattttccaggaatattccttgggaactataaattggtgagttctcagaggagatccaataaagagatcccttctccctagcctgagttctgaacaaattaggaaagaaggtactcttagagtcatcagatggagaacaaaacatcacctctattgtggccagarcgatactggagacatagcttaattcgagagaagagtgtctgtccagaattaggcgggggcgggaaaggtagggcggtggggggctgggggtgttccaggtaggatttatgagtctgctccctaagagtagctcagatttcacaacagttgaaacagaatacaggaggaggagttggttgaaggagcagagaggaaagccagctttgttcagggaaaacccctccttacagaaaccaggaatagggaagcagcggtcccattagtaagattgatgactcyctcaaattccccacttaccctttaaagctcactggcactggacgctagcaagaggacaaagctctgggaatcagtaaaggaaacgttgtttcctttcactacaggtttgttcattttagccgtctgggattttgtacatccctttttgtttgctccattgttatctaagagtaacatagttttctactttctaaaataatttagcagtagggtttggtaaacagggattttgaatcatccagggcttgcttatttgttttttcttttctaatttacttgggtgggtttttgtgcaatttaccatcttggcctgagctgatcaccatttgaaccatggatataactaagggtggtttatggatgattcacttttcaaagactgtgaccctggtccagggcttaactcactaatcctctttcaaatttgtgttgtacagcactggaaatattttgcagtgatttttaaaaacaaatatcacttatccaacttgttgcggagaacaaatattacagatttttatcagtgggcattgttcctaattaacttaccagcgctgacgtggtttgtttaactgtgttcccaatcttgctgttttctattctaactgatctagagactgactatattaaaggggtctacatacaggcagtggtgtgggtcatagtggaatcaaggctgtaccgttggccatggtctgtcaccttctcctcagctgagctgcaatgggatgttctgtggttgctctttctcttccacaggctgtttactgagttttgagtctgttagggagggagatggtagagtggcatataccattcagcaaacaagttttaagtgtctatgtttaaagccaaaccctgtgataaatatagaatgtaaaaaaacaacatttgtgtttaatgattctacagtctggtttaaagaggtggaagtaagacagaaacatgtgaaaagataacgattaaagggttaagtgacaatgtaaatcagttcaaaacacactcaggaagccactgctgtgtgtttgccactgtggctggtgctgagggtatgaccgtgagagataatctaggccacagttcacattcccatggtgtggcaggcctattcaaaagctactgtggctactatatatgaaaaaagccctagggaatgggatataaagaacacagatcagagagtaactgatttttactgggctcagagaatactctagaagggaatggctgttggagctgggccttgatgactgagtaggagttcgctgggtaaacaaggctggggagaccatttcaggatgggaaagtagcatgaggcagggcagaaatgctggtctcctcatgctgtgtgggaaggggcacgagaggtaaccccagagggtcctggagtcaagttgaggagggcctaactccttcctgagaatgagatgctaccttgatgaggcaaccgagaactactagcacttttaagcaggtagatgatgtcagtgagtggactagggtggtggaatgtgaatgggaaaaaaagatgtggatggcaaaagaagaggtggtgtgagagatgcagttgaggataaatggagtcggcttgaggagtgttcagaaaaagccaaaaggatgctgagaaatgaaacttgagaaatggaatattattggaatgaaattattggaataatcgtggtacacttaatagaaaaaaaagggagttggaaagtgaggtaccattatgaaggaagctgatgaattttaactattttaacaatagtgtcactttcactactatccatattgtttttatttttatttatttttttgagatagggtcttactctgtcactcagactggagtgcagtgaagtgatcttggctcactgcagcctccacctgttgggctcaagccatcctcccacctcagtctcctgagtagctgggactataagtgcgtgccactatgcatggctaatttttttttttattttggtgtagagacggggtttttccatgttgcccaggctggtcttgaactcctgacctcaagtggtctgcctgcctcagcctcccgaagtgctgggattacaggtgtgaaccaccaccctgagccatgttgcttttaattccattcagtttcaaattagttaaagaacaatataggttgagtagccctatctggaatgcttgggaccagaagtattttggattttgaattttttcacagtttggaatatttgtaatatattcatatattcactagttcagcatcccaaatgtgaaaatctgaactctagaagctcccaaatctgaaactttttagtgccaacatgatactcaaaagaaatgctcactggaatattttggagtagagatttttggatttgggatgctcaacctgtagtagttggggttgcggttccttgaaaagttataaatatatccttagctctaggtagggtgaggagattaaaatgtttgaagctatactatgctttgtataatttgagtcctactcagaacagtgctgatctccctccccacaacagaagagtgaattaaactaaggattagtagattttagcatttacttattgctaattggaattgctttgtattctcaagggaaaggattcagctttggaatttctatccccatttaaagtccgatggtcttaacgtattgatattcacagggtactatatgcctctgcctgagtttccgaggcaacaccagcagaacctccccttttgggggtgtctttttgggggactttttcttgatatctacactccttggaatcaccacagcttgctgttgtcaattgatggtcctgaaatctctccctttctgtcacacccttcttattgttcatgctgtttttcagtgtagatgtacatatcccatcagtgcacctgggggctcttataactttctatatctttataaattttttaaaatagaatataaagataaggaatattgagtatgaaacccacaaatgaagatgcatcaaattacatggatattttacatttacccatatctaaattttaatagagacttaacttattgatgtgaaagccagtattgtgtaagcactacataattctattttagattattaggatttgtcctactggcattactgatatgaagggagctaaaaagccttgggacaactagacttttgtttcttgagcacatttaaatttgagccttctttgtaggaaaaattatacttgattgcyctactctaatttcagaagcattttgaatgcattattgaataaattttgagttttatggcaggcagcagggagttgggcaaagatttgaaagaatggcagatgactttggccttctcttctaaccttcttatttggggtatggacaaagataggaggtatgaaattgggctgaccaaatacgatgttatttttcagaataatattcagtgagcatgtacatagtgttatgcatgaactgcgattttgagcatgaggctcaggagacccgtatgttgttaaatgacatggcagtgtcgggagggaaagggaattgggagaaagttttcaaggtcaaatatggtcacgctgaatgcgtgagtggttgaggtttttatgtaattaaactcaaagctaaattctaggaattttatatttgaaagtttggcttgacttttaatagaattttagttcctggcatatagtgggctatacataagatgggcaaaagagtagatgagaaggttctaggcatagtgacaggtgttgaggatgtaaagaggacagagacgtccttctcccacctaggggactttgcctttgctatgtcctgtgtctagaggatttcctcctcccaccttgcccccagatagccacatggcttacttctttagcatctttgaatctgtgttcaaatgccagataatctgtgaggccaacctaaactttccttaatctacttggaacctgtgtccaccttctctaatttgtttttctccatagcattttgtagtaatttaatggcatataaatatatatatagctattattacatgtataccatatatgtataaaattaaatataactgttttataatagtctattttggctggatttggaggatctagaaattagttaagataaatttagaatggtaggttggggacaaagaatggaagctcttgaatggagttggtcagatgtgtgatgtatatatgttatttgaccaagagcagtggagcatcactgttcaacattacacagttatgaaatttattttattcactaaatatttattgartgtcttctgtgtatgctctaggcagttttaggtattaggataacacattagtgaaaagatatgcggaaatcacttcccttacaaacttttccttctaatgaagtgaaatgtaaccaattactttggtcataagaagtgatgccctttaggaaatcatggctaaaaatcagatctgacattcagatgacgtgaaatgggatgatggccttgacaaaaggaaaaagaacgggtgttagaaccagtgtggggaaagaagaatgtggagagcttaccgagctttgattgtttggagatcagggaaaagaggagcttttggttcctctaagatttgagtcttggtaactgaaaggatggcagagctcctaaggattgtcagaaacggggactattttgttggaaaactgtggtatgtaatttgatatgttttgaatttgacagttgccatttattctgtggaaatgcccaggaaagggctggaaaagtgtatctgtaactcagaagagaggtcagagaatgagatttattgcagcagctgatatttacttatttatctatttaaaaatagtctagctctaagtaaatgagttaatataagaacacacagtatctgttctttatccaatgtcatggggtaacggttgctgttttaatttggtatcctatcaccaatgcttattggtattataggaatatgtaatgtttctgagcaagtctaatcatgcagtacttcaccaaagggatattatatttctgatgctaggtaatggctattatatgctcccactttgcgtattatgattgtcgctaaaatagtagcatatgttgtccttatccacatcagtaatcaatccattcttgaaacttattaagctactcacaataataaactactaataataagatctactgcttgattattaggaaatattgatgtgaaaataagagatttgggattaggtttagactcttaaaattgctttagctgataatacattttatgatcattcatagttggtttatattcttcatgtctttatttttggggatactgtaaaatgatgatacagaaaataccttttagtttttttgtgtgaaaaatttctagatcagagcaaaaagctctagatcagagcaaaaagctcaatttatttatcgttagacacaattttatttttaagaaatattacttttctgtcagaagccaacatttggattgtagtgaaaatacacaatgaaaattttattttatttgtgtttgctatgcatacatctaaaggatttgatataagtacccagtggagtgtttttgctcagtatcgtatttctccatcgtatgagtgcattggttttaggtaaacaatggaagacaccactaagaaatagtaggaaatatttcctctcacattataggaactcctgaagggtggtgccactgtcggtttatgtggccactcagccatatttccacaggccaatttctttctgtttttctgctaagctatttcagcattttagcttttcctctttgctttgtttactcatgattgccagatggctacgttacctctaagcatcagatcctcacaaattaatggttaaatgtaagggagggattttactctcttgcattaaaaaaaagctttattgagatataatttactgtaacattgactcatttaaagtatgctagtcaatggaccaaatcttgaataaactcccattcacaattgctacaaagggaataaaatagctgggaatatagctaacaagggaagtgaagggcctcttcaaggagaactacaaaccactgctcaagaaataagagaggatacaaacaaatggaaaaannnnnnnnnnnnnnnnnnnngatacaaacaaatggaaaaacattccatgctcatgaataggaagaatcaatatcgtgaaaatggccatactgcccgaagtaatttatatagcattatatatataatgctattcccattaaactaccattgacattcttcacagaattagaaaaactactttgaatttcatatggaaccaaaaaagagcctgtatagccaagacaattctaagcaaaaagaaaaaagctggtgacatcatgctacctgacttcaaactatactgcaagactacagtaatcaaaacagcatggtactggtaccaaaacaggtgtatagactgatggagtggaacagagatctcagaaataacaccacacatctacagccacctgacctttgacaaacctgacaaaaacaagcaayggggaaaggattccctgtttaataaatggtgctgggaaaastggctagccatgtgcagaaaactgaaactggaccccttccttgcactttatacaaaaattaactcaagatagattaaagacttaaatgtaaaactgaaagccataaaatccctagaagaaaaccaaggcagtaccattcaggacataggcatgggcaaagatttcgtgacggaaacaccaaaagcaattgcaacaaaagcaaaaattgacaaatcgtatctaattaaactaaagaagttctgtacagcaaaagaaagtatcatcagagtgaacaggcagcctacagaatgggagaaaatttgtgaaatctgcccatctgacaaggtctaatatccagaatctacaaggaacttaaataaatttacaaggtaaaaaaaaaamacatcaaaaactgggcaaagtatatgaacagacacttctcaaaagaagacatttatgcgaccaacaaacatatgaaaaaaagctcaacagcactgatcattagagaaacgcaaatcaaaaccataatgagataccatctcacaccagtcagaatgacaattattaaaaagtcaagaaacagtagatgttggcgaggctgtggagaaacaagaatgcttttatgctgttgttgtgaatgtaaattagttcaaccattgtggaatacagtgtggcgattcctcaaggatctagaaccagaaataccatttgayacgcaatcccattactgggtatatacctaaaggaatataaatcatttgactataaagacacatgctcacatgtgtttattacagtgcaattcacaatggcaaagacatggaaccaacccaaatacccatcaatgaaagactggataaagaaaatgtggtacatatagaccatggaacactatgcaatcataaaaaggaatgagaacatgtcctctgcagggacatggatgaagctggaaaccatcattctcagcaacctaacacaggaacagaaaaccaaacactgcatgttctcactcataagtggaagttgaatgatgagaacacgtggatacagggaggggaacaacacacaccatggcctgttgggggtggagcggaaggggagggagagagttaggacaaatacctaatgcatgtggggcttaaaacctagattatgggttgataggtgcagcaaaccaccatggcatatgtatacctatgtaacaatccggcatatgtatacctatgtaacaatcctgcacattctgcatatgtatcccggaacttaaaagaaaaaaagaaaatatgccatgaagtggtcactgtaaaagccgttattggctgggcgtggtggctcacgcctgtaatcccagcactttgggaggccgagatgggcggatcatgaggtcaggagatcgagatcatcctggctaacaccgtgaaaccccgtctctactaaaaatacaaaaaattagctgggtgtattggcgggcgcctgtagtcccagctactcgggaggctgaggcaggagaatggcgtgaacctgggaggtggagcttgcagtgagccgagatcgcgccactgaactccagcctgggcgacagagcaagactccatctcaaaaaaaaaaaaaaaaaaaaaaagtggttattatttttcccacagaaacaatgtttttattacactttctatccttttaaaggcttaacaggaaattagttaaaaatatcgaatacttttatataaaagcaaagatagtagctgtacctctgtaataactttacatagtaaaattttcttctgagttacattatgtacagcaaagatagtccttggcatttttaaggggcttttctcagtaagtacatatacatatacaaataaagttttttaattgatattatttctatcacaaatgtgtggccgggcacagtggctcacatctgcaatcccagcattttgggaggccaaagcaggtggatcacttgaggccaggagttcgagaccagcctgagcaacatggcgaaacccatctcactaaaagtacaaaaaaaaaaaattagccagacatggtggtgcacacctgtaatcccagctactcaggtgcctgaggcacaagaattgcttgaacccgagatgtgggggttacagtgagccgagatcatgccactgcattctggcctgagcaacagagtaagactgtcttaaaacaaagcaaaacaaactcaacccccccccagaaatgcattattcgtaataaaaacttttagaaaaaataattttgtttttgttatttgaatttacataggtttttgagaatgctttagatggctgggatgataaaggcattgagcagtacagtgtatgtacttgttaggcacttgtgactgtgcagaccaggggaatgagcagtgctgggaagtcgagtctctagtcagtcctggagaaagaggttcacggttaggtaagattgggtataagggaagtcctcactgcctaactggagctcccatatctgctctcaacatttaaaagcactttggccattgatgattgttcactttggattatgttcaaaatgtaataatcttgttttaaaaatcgccccccaccccggctgcacccagcccagtcagtatgagctgtactgaactgaagtgcattgccttgtaaacacaggtaaaatttcctatctgaattgttgagcttttttggttcacacccattgatgcctttcctgttcctaattgacctttttgaaaacctcacaagctgttttggtacaagttccacctcaatcaaagaaaatgatactttaccttgttacaacattgaaagggaacttgggctctgtatttcaggtcactagtgtgttaaaagtcagttttctagaatgtcctttaaaataagttgatygcctatagcactgttattttattaacaggagagtcttacacaaatctcagcgaagcataattccctttaattagcactagaaataatgtggtttatgatgagtttgctagagaatggttctttgtgcaactcccttgagcaacaagtgagttggattagtttgttatgattttaaagtaaattacaaaacttatataaataaggaagtactttatgggaaaagcataggtgtagattttcacagggctatttgtctttcagattagggcagtttcatttagttgtagagcaagaaaaattcctccacttaagataatttttttttttggtagaattctggttacatgtgccttcatgtatatatttgtttttttggcccatcaaaatttacttttctcacaatattttgaagatatatggtgtttatattgttgaaaagttttgtgttctttgcattgtctcatggccgtggagttaatacaagatgcactgtaccataatccccagggaatggtgggaatgattatgaagactatgtttgccagacacatgccatatcttatttcatcattaaaatattccttaaaggtagatgttatgtctgttttttagctgaataatcaggtcatgagacattagttgcccaaggtcacttaggtaatggctgagacttggaccaactaccgttctcatccctatacactgtaccccttcccctatttctaataaacaggttctgatttttgctttagataattgcaattcaaaaagtgaaagaccctgagtaagcagtgttaacagacaagtacctttccaggtgtagtgggaattaaaatagagtggtttttaaaaacattttcagatacatgcattttattgtaaattgtaatagtttgaattgtaattggatttaaaaaatactctttctgaaaactgggttattagacaatctattagctatgtaaagttggagtgtgaaaattgacagtggtatttcgcgggcaaatgaaagagaaatgaaatagtgctgaattttaaacccaattaaaattgctctatgtgcatgcttattactaaaaagagcttattactctaattgttatcaccaacacacctgaaatagttaatacataataatccaaatttgccatacttatcaagattgtaaaaagatatattcatttagtgaatgcattgcgtgtgaaggaggttggactgtacctcgtgggcagataggagcacctgatgagcaggcttgcagtatataattgcagggtagagaatgaatcaaagccagctttggaggcatggagacagttaagagacgggcataagtctatctatagattatggatcttgaaactaaggcactggtgatgggaatcagccaagtggatgcatttgggagatttttgagaggtggaaagggcaggacatagctcttcgttgtttgtaagggaagaggatgatggaagagatttctggcttgggttccatcaccagaggtgggaactgaagacaaagacacagtccgaggggcggtggagggaactcagctgttaaatgctaactttaaaatatcccactggagatattttactgggcagtttaataaagggatatggtctcgggacagaaattttgatttaaaatgctggttttggagtcatgagcatccaggtgaggattgaagacatgtgagtagataagaacagccatcaagaacatgctcagagagaagaggtgttagggcggaaccctgtgaggggaagagaaccagtaatggagcctgcgatggaactgctgttgaagaagaaggagaccaggagagtgtggcaccacgaaacccaggggaaggggcagtgtgagaaagacaggcaaggctaccggctgctgcagagcaggtgatctggtctcccaggcgaaaacgtgatttagtggggaacatggtgagaagtttcagacgagatcgggcgcgttcagggtggtatggccgtagacggtgagcagtttcactaaactgatgggacaagagacagatttcagtagatagcagaggaaatgggcaaggaggaggtggtgatgggagtggagataattttttaaacagttacctgtgaagagaaagtagtaggagggtatgtgaggtccaggaatttttttttttttttttaaagaggagaaacatctatgcatattaaatggtgttgagaaggagctaaggggagagaggttaaaggctcagaaaagagctggtggatgaaagacccttgagtgctgtggcagaaaggagcagatgtttactcctggaaaagaggaggagggaggaaggactggcaggaggtcctggcaggaagcagagacagttccttctgatggttttattttctctgggaggcaggtgaccttggtgttagaatattagtgatgtgtatgtggggatgctgactggtgggcctttgggctggatttaaggacggctccagctggcactgtatttcgtaaattgtagagtttaaacacttggaggcatggccccaattcttcagtttttcacagctctgctgtcctcacttctggagacatttgacattggggctctatggcggtgatctggctttctataatggaatgcattattagttatctttaaactgtaagaaagtaagtagatgagttcagcggcataatgagaagatagccctactgaaggtaagtgaccataactgtgttttctaaagtggggcgctagacctttcagtgctgcccacctttctgtcgccagagaacctcccacttctctgactcggattctgctctagccagcacttgctctgtattttctaaaacctttccagagactattccttgcccttgtaagggcatcacacgatagacagtctggtctcccttttacaaaggagactcagctcaggtagctttcccaggagctggagtgagagtgctcactaacaccaggtgtgtggctggcatgctagcagtgtcttgggtcacacattctcccttcctttccctagtttttcttgtctttgcggataaccttgccattcctccgtgctttgtgtgaatactcacactgtgcagtgtaccccgctctgtcttttccaaccctccctcttgggatcagaggtggcataggtggtagagccatactccctgtgtccacagtctgtctctgtcacttgtttgctgtataatcctgggcaggttacttcactttctgtacctccatttccttcttgttaaattgaggtgtttgatggcggtcatagaatctattattataaagatgctaatgaggatggaatgaagtaatatttgtaaagaacagttcttggcagaaaatgtcatatcagtgcctattaaatcaataaaaatacccacagcatcctttaacatttcgattgtgcactaatccttttcactcatccttttcttctattgggctataaatttcttatttttgtttatttacatcctggattcttttataacaagatttgagtctttgcatttccagtgccagaagcagtgaacactaaaaccctagatactgtcggtgctcaataaatgttgagatgagtgctgccattatttcagaactctttcatcatcgtggctctcattcagggatgagcagggagaggattgcagccattagtcactgattcactgtatagaatgaacagatccaatctataaatgacttacattctataacaagacccgttgacaatctctttgctttctttattttacaaaataataaatgaagtagggaagttatagcaatttaattgcagctatagcctacaattcaggttttttttttttagaaaataaaatgtaggatatttcctggaaatcaagaaaccagtgttgaagaatgagttttaattgcttctgattttacattaaatataaaacataaaaatgatgtagtttttcttttctttgatstatgactgcaccaagcttttcccaatcttttatagtgaatttcataaaggaagcttcatttttgggagaagagtccaatggtgttataaagccctgttcctaagaaggcaggaaatcagtcagcatttaaagaggcagccattctgctttgaaataagatcttctttttataaattacatagcactagtgccttttactaagaacactataaataccttttgatattaatgtcttcatgggggaagttgctctgaagccctctgtcacattcccctatttctcttctacctatctgtatacaagacttggttaggttttggcagacataacaagtaggtgatagctagagatagaatttcgaataatttatgttccattccatgctttacagtattttgtcactgttatatctgtctacaccttgaacgtccttctctgaataatagcagcataatatattgacagtgatgacttaaagcgtagcagcatgctgagaataatacacactaaatcttgatttatctgctgatgaatgggctgcttcatataattatgagtggatctggaaagagatggtgctttctctgttaactatttctcagttatttaatgacccattttgtgacttaaatgttctactttctgtttccttttccccctttttttccttctttttccagtgcttactatcttctttctttcaatttccagtatcataagaacagctgagatataatctttttttttctttttcaaaattttatagccccctctgagtgctctgagaagggctgttttgagtgtggcagagcctgggtgggtgagatacttggcttctggaactcagaatctattgggacctgctacagttttctatagttggattttttgggggctgaggaaggcaattaagcaaaatcaggacacagaaataaagatctgttcttgatgattttttccctctgtgaagctatactctatagtgtcctggctcagaggaaagttcttaatgactatacattgggtagaaagtggtttacaggtccagttacatctgagttcatgggctgcattgaatatttattattcatcaaaacttaacagcagcctgttatttctctccagttttacttttaaccattaagaaaatagataagaatattaaaaagtcaaaggtgagctttgctcactctcaaccagtgatttcagctgacttctaatgtctgttttctgataatcctgcctaccttataggctgattggccttgctccacttgttttatcctgatgtctctgtgttctccctgtgtgcctttcactgtcttgaaactgccatctcaataatctaaaaaacaataggtccaaagtctctttctgtcctmatttttccttgtttctttgcagctgtcatagctttgctgctagtatctccttgacagtattgatgcccacactgtcttctagaaagtctgttctcttttaatggcactttggaattttctgagttccctcttgcatatttgatagtccctctttcgttatctcaccattttccaaagctcagtctttggtcccccgtcagtttctctcaagacttgatccatgtattagtctgttttcatgctgctgataaagacatagccaacactgggtaatttataaagaaaaagaggtttactggactcacagttccacgtggctgaggaggcctcacaatcatagtggaaggtgaaaggcacgtcttacatggcggcaggcaagagacagagtgagagccaagtgaaagaagaaaccccttttgaaatcatcagatctcgtgagatttattcactaccacgaggacagtatggggggaactgctcccaagatttgattatcttctacaggatccctcccacaacaagtgagaattatgggagctacaattcaagatgagatttgggtggggacacagccaaaccgtatcaatccatgagtgaaccaactctacaaggtcacatttctctagggcaagcttgtccaacccatggcccgtgggccacatgcagcccaggatggctttgaatatggcccaacacaaatttgtaaattttcttaaaacattatgagattttcttgcaattgtttttttctcatcagctgttgttagtgttagtatattttctgtgtggcccaagacagttcttcttcttccagtgtggcccagggaagccaaaagattgaacacccctgctctaggggtatctgctccctgtacctttagccctttctcaaggcagcagcagttctgcacctctcactaatggggcactagtttgattgttctgatgtgggtttacactcctatctaaaactgaattcaattgtggctcacacctgtaattccagctcccctggaggctgaggtgagaggatcacctgagcccaggagttcaaggctgcggtgagctgtgattttgtcactgcactgcagcctggatgacagcaagactccatctgttgcaaaaaccaaaccctcaaaacacccctgaatttatctcccttttgataaaatgattttggtagaaatcccagttatctcccctctttctcttcctttttcttcctatctgttggttgaagttctctgtctctttctcccttcccactgtctcccctcctccctgcaccctttatttctggcatctccagcctccatctttctgtcaaatgcccatcagtgcctaggaggacaggtaggatttgtctgggtgtcagggcagattggggaaaggcattccaggtgagtgggcataagcagaatggggaggctgttgtgaggagtcagggtcatgcttggtttgagcatgtggggagagttagggtggggaaggatgtggtttgagaaatgtaagtctgatatggataggaaataaaggaaatcagagattttcaacagaggaaatgtggtgaaagttgtgttaaaaagagattagtcgggcttcataatgtaaatgccagggcccaggagaggtctagatgagctctggagmtaaaggcacgggggtcccaggtctcaagcctggcaagcggggcaggagggggagttctatgaagagtgtgtgagtgggaagctcctttgaagagggttgatgtcagttgtagaaatgttcatcttgaggtgtcaagaagacatctgaaaggaaaggtccctgcatttgcagttaggagatgtcacagaatttgtatgagtgcccagggctggggaaaaggaaatttgtgagtcataattgccttttcagtgtttactactttttccsttcctcatgattcattctttggtactttgctgccgtcgtattatttatgttagtaataaacctcatttgtcgtgaagatagctttctgttaagctgccatgaagtcttcaaacttatttttctcagtgacaaatgatgataaggctgtggcatgtcgcaatttcttaactttggacaaatttatctattctgtgagttaagtgcattaagatgaacgttttgaacgtttcacaggtgctaatggtaaggcagcataatcagttgcgggaatatgaagttgtgagtcctgtagcaaaagctcggtccaagattttccctgaagctgtaaaaggatgcatcatggttgttttcctgtggtccgattttttaacagaagacataatggtcatcatgctgccagagtaataatggatcttggctgttttatgtctttgtaacacttgcctcctgttggtgggctggggggaagagttataaggagtgaggaaggactcagctttaattgttacrgaaaaccactttcttctaccctgaggtgcccaagtgtaggaggaggccaaaccttttgcctttggagggagaatggctgaagggagcctggaggcagattctttcagcaggagggattctgctrttgttgttggtagccatagtaggtcttgggttcaggctgcaagaggcagcccctcagccacctgctgtgcagtgtgtttaccaggtagagcaggtccaggctcttgaaggcctgtggggcagggtcctgcctggagccatctttagtccagtggaccctggaggagtaagtgaccctatgcagtgacccgtctacttctaaacagatgcagtgctaatgcggccgacccttgctctccttagaaatggtaagtggcatttacatacttggtctaaactataatccagttggctgcttttctttgtcagaatccatcatcctgcttccctgcctttgctggctatatataatgctaataacagtaaaacgtgataagaatataggaaaaagagtactatgggaagacagagaaaagcgtgaataatccaagcttttaagatacagtctcctgtgttacagagagacatgctgaaagaagttagtgactagtgaagttcacagagctaaagagttgtaggactgaaacaagaatctaagacgagattcctagcagaggtcttttatgagagcacattgcctctcagaataatggagctggagaagtgcacagggttgccgcctctgtatcctgccctctccatagaccagacacaccccagagcatatctgggcggttaggctttgaagtgagtcttgtgagtcctctctgctgataatagctgtctacttggaccttaataagccagttcataagatgtactgcaggccacttcatcgtttcctaagccatatctgtagtatcatatgcttttccattcagacctgtttgtctccagatatctttaaccactgcattagaacaaactttggagcgtgtatccataatatatgtatttgttaataaattatattcatgcactaatatgtatttatattatgtattttatgaagcatagaaaaagttgaaataaaaaggcatttgataaaaataaatataagtagaagttttaatgtgttatttctgatcatcagaggattgttttgtcacttcatcccccctccccaaagggatcatgttttgtcttagaagaataaatcccaaattttgtcactttaattgttagggtcatttttctttattcccattggtattagtcgtcatcagatttaaacttctgttggttgccatactttttttttgtttgtttgcatgatctgtattagtcagggttctccagagaaacagggagagggagaaagagagagaaacagagggagaaagaagagattgggatttaatttaagggactggttcatgtagttgtgggggctggcaaatctgaaatctgcaaggtaggccraaagctggaaattcatgcaagagttgatgttgcagcttgagtttcaaggctggaaacrcaggctgatttttatccagagttctggaggcagaattccttctcccttgggggacctcagtctgtgctcttaaaccctttaactgattgtatgaggcctactcatgtagtggaggcattcagctttactcaaagtctgttgatttaaatgttaatcacatctaggaagcacctttgctgcaacatctagactggtgtttgatcaaacaattgggcaccatagcctagccaagctgacacataaaattaactgtcctgcactcctgtcatagttttttcgctgggacttttgtggtatcctcctagcttatattccagctttcagtgtctgctacttccaatccagcccctgtactgtcaaaaagacctttgaaagaaagaggttattatgggggagtttgattccagactgcatacataataataatattcattgcaataatatattgctttagtgttttctagaatacagctatggtaacatttaaagctctgtgctgtctgacccctctagctgtctagcttcacctcttgtcattgccagacttatgtaccctctagctacccactaaggtactgttagtccttcaaaagcacttataattttcctgcctctgtggctttgctttgtggaacagaaccagcactaattaatataaggcacaatatgataaaattattggaataaagaaggggcagtggcagaacagatgtcaatgtgaataattcaagcttttcagatttgaagagactttcttatggtgagcagaaagcaaagggtgagatagctggtgtcatgggcagaattgtgtccctgccaaattcatgttgaagtgccaattcctagcacatcagactgtggctgtatttggacatagggtcatcacagagataattaggttaaaaggaggtcattaggcatgccctaatccactgtgcctggtgtccttataagaagaggaaatttggacacagactcctagagaggcaagactgtgtgaagataaagggagaaggtggccatctataagccaaggagtcagggctaaaaaggaaccagccctgcccacaccttgatctcagacttccaccctccagaaatgtgagaaagtaaatgtctgttgtttaagccacccagtcagtgccactttgtgatgacagccctagcagactcatacagatggagaggaaaggtgcatgggtagcagagtgagctaacttgagaggcagcgcaggtgcagagtgctgtgcctgtgagccacgcacctaggttaccactactaggttacagctgaaggttggccaagttccagaatgggttggacatttgcctggtacttgaattagccaacctctactggtgtagaaagggggtctgtcatgatttgtttggcctgaaaatgagagaaaggaccttcaagagaagaaggtttatcagaagcaggacagagctttgtttttcaaagcttgggtcccttgttattgtgaggggagggagaatctcttctgccctggaaccgccaagactcaggtggttattgaagacccagaaggtagagtgaaggatgcgtgggagagctgctgttgctgctttcatttcgtgttattttgctggacatgtgggggtcatagcaaccttctgttatccttgttagcttgggttggctgaagtgccagcatttctcttaatttttgtcttttgttaaaaagaatattttttagaacagtttaacatttatagaaaaattataaagacagtacagaaaattcccatataccccaaacccagtttcttctattagtaacattttacattagcatggttacatttgttacaattaatggaccaatactgatatgttactaatccacattttatttggatttccttagtatttacctaatgtccttcttctgttctgggatctcacctatggcaccatacaccatattacatttagttctcatgtcttcttaggcttcttttggctgtgacrtttttctcaggctttccttgtttctgatgaccttgaccgttttgaggagtacttactggtgaagtattttgtggagtgtctctcactgagatttgtctgatgtttttcttgtggctagattgggttatgggtcattgagagaaaacacagcagtaaagtgctcatcacatatagggatacatacaccctatcaacatgactaatcactgttgatgttgaccttgatcagatagtgtttgttaggtttatccactgtaaagtcactatttttatccctgttccatactttactctttgaaacaaagtcaccacccacagtgcacacttaaggagtggggaccctcagctttttaaacacacaaaaaatgtgcagcagcttttgaagggcagctgtgagtgatgatgttgctgaattgtggggagtagggaaaaagaaaaacccatgcttttgtggtttattaatgttttgtttaaaaaaatgccccaaaatattgctgtgagaagtaagaaaaatgccagttggaattttgtaatttgtggaataaaaatttattttaaccttgggcctagaccttctttgttggtggtttaattaaggcaatcagttcttacctctaccactaggactcctatgctgttgttgcagccggagaagggaagattaaaattgtcttttattattgagagattatagracatcrttttcttaaaagcagtgcctttcagttgcatttactgggtagtcacagtctctgtgagtttttcacagcctcacagcctgacctggctgagtgggccatgggtacagtgttttcctagttatctgttctattattggtagaggacttcattasctccccctagtggtcagttttataatatcagattctacctgggtaaattcagcagtggaaaaatccaatttgtggccatccttatgataattttcctgaatattttaatataaatgctaaaataaatagtggttgaattttagctatgtcttttggtgttagaactaattttaaaatraggcgacgttgtaaggcggtaagtaattataacgatgaaaagctatagtgatgaaggtaatattctaggcagaaggtttacctacctactattatactaggaacctcagtggacatttggtttttaatcaggaattgagcttggcttcttgcaagtgttttatcagtgctgtaggagcaagtgcatattctagataaacttgaaagctgcaaagctttatgaggctaggagtgagggaggcctctgagcattgtttgtcatttcttcacagataaaattttatcgccagtgcaggaaatcgcyttcttttagagatttacatcagcatttattattttaccgtggctttaaatatgcagcttttttttttccaggatgctatctctgaatattcttagaaagttgaaataatttactggaactggaaactggctttgtacatctcctgatggaaatactgggtgatgcagtatttgattatgcaggtattcatcctttgaatgagttctagtgtttgtgcccagacctggagttttgyttcatggagattcaaaaggatgacatccaaggaaagataactgaatcaatgtgaagtctgtgagtccctccagttgtcttcctcctcatcaggactaaaactggacttaagaggcagcgatccactaagcactgcttctgttcagaaataagaaggaaggaattcatacagagaactcgtattaagccagtagtttgtgtctacttgtgatcctcttgtggtatgtgataccatatagaaatagtaaagaaatggctatatctttgcttttatgattagaagtagcacattaaatgatgtggtctgtctgttgccactcactcagctccatctgatccactggaactccactctgtttggcagcattgatgaggctgtggggaagccgcacggaatcgccatcattgctctgtttgttcaggtaaacggtctgctgtgattatcgtattgtttagagatgctaatttctaaatmattttgtaaaatttttttattctcaattttattgcttagagatgaaattacacacatagagagaacacctgataaaaacagaaaacttgatccttatggtttatcggagttcagacatattcattggtagaaaatagttcctttatttattagaaattttcttcagagtagcattcagggtctttggagaaatgatttagaaaatgactcctgaaggtagagtttattttatgaaaaaggatttcagaaaatgtctttagaccctggtttacagaaaaatctacaaaaaaaatcaataacaataatagaagtatgtagtagattactttagcccttctttattaacaattttcactctgagatgacttgaaatgccttataggaaacactgataaaaatcagactggcaaagaccttggcagatatagtcaatataacatttggatttgagctctgtggtaggcaaagaagagtatataaatttacccaaacatatgaaagcaggccacgtgctttcagaggtaaaaacttaactcagtttttaaggcgaatcttctaaattttgtcttattacctgtttgacatcgtaaaagatttagaggtgaaagagtatctggaaattttagctttaaagctgccatcaggaccagaaaccagagttgcagctctgcgtggctctgggctgcctattggataacctgggattagagcatgttagcacagtgttcttcagaaacttaattttccaaagagagttcgataatgggcccttttaaacttgtttttttatggcatatatatcaaaaattaattgcaacaatttttaatacatatctcctagatatgtctttattgatgtttgaaagtagccatccagtttaggctcttaatattttaaaatcagcatcttgcaaatatgacacgtcatagaaatttaaaggaaatccttacatttttcagtgagtcctcttactatttatttcatggtgtcacaggtggggacctatattccttgtgttttataacggcgttatataactagaaagaaatcacaaaatattaatgaaaaatgttttcattatacaaatatattttgataatttttagtatattgaagtaacaatcatgaaagactactgttataacccagaaaagttaataaaatatctaaatctgagaaattgagacagtagaatgtactatctcattattaaaagtaagaataaaaaatagtaaaataaaaataagaatacaaataaccacatattcatatatagaagggaaaggaacatgtcagtttcatctttggaattggtactcaataaatatttgtggatggaattaggtgtgataacttagtattttcacttcctgattcttagcatttaacaggtgacctggattcgtagagccccggactgaaaacccagccccttagaactactgcgagtatttccaagaacaagctgcattattgcagggaagggaaagcctggagagcaagcacactttttctaacttttcataagtttctgtgatgaaaaattcaggttatctgtgtgcaaattctcaggagagagtgaaatcacagaactgagagcaaaatttcaggaaggaaggaaggagggaaggagggaaggagaggggaagggagggatgggctgaaatccatcgggggggtcgggtcctcaggctggaggagagaaatttggagggaggaagtcggagacattgagtagactttccttccaagaagcttggccaaaggaaggaaggacagatggggcaataactagcgatgatgtccagtgaatcttttgagatctgagatctgcatgtagtatttttttttccctgagcaataagagctattgcagacatagagattaaaaatactggaaagagagggtgtcactgatgtggaaaagtcctggaggaggcaagagggcatgggatggagagcttatgcaggtggactaatctcagataggagcagacccaccccttctccaaaacagagggccaggaggaaagtgtggacacacatggggccgatttgtaggtggagaaaggcaggacattgagggagttcatgcctgacaaccttcattatctctgagacacacaaagcaaaattatttatagagcaaagaaaacgtgggtgtgggattgagtcttgaaatagaccagaaggggatgataatatatttggcagtcactgagggaaaccccnnnnnnnnnnnnnnnnnnnntgagaggtgagaaatgagttgttctcaaggttcctggtggactcttggtaccaggttgtgttatctgaacagctgcttgcacggttttagcagctggggtgtggagattatcatcagtacttgctttttgctggtcatcatttcttcatacacaaatttggcaaggaaggaaaagaaagagatggcataatagcagagtttatagaatttgcaagatatgaggttttgcccataaagtagagtctttatagatagaaggagctagtaatagtcgttaagagctactatatggaaaaactatatttgatgctgtagggcatccagattaagaataataatggacattaagtgaattatgatgacccaagcctgttccacagtctttgtttgatttaatcttatcttcaaccctatcatttttatcctctccagcaaacagctgaggaagcggaaggatgtagaggttaactacacttgcttaaggccacacagctaagaggtggcagagtcaggattggaatccaggcagtccagtgcaaagtgagcctgttcctgagcaccacattgagtggccttagggttcatatgyggactcttcaaagagtttacaacccaacaggagatgcctgagatgaaaacagaccccaagtgcagacgtaggcctcccagtgctatagcatggttaaaccagtaagacaaaagagaagtccatttctcctgaagaatgggtaatgatttctgcctaaaatttcaggctgctgccacaggtacatatgcattaggttttaaatgtttttttgtttttaactttacaaaatttattttctgtttttagagcctatctcgggaataattgtagactcttggaaagtagttcacgtcttgattgtttagagctgactggcctatcttaggtagagcgtttcttgtctctctcctctccctttggatgctctttcatctgcatgttttgcagttagttaacattgggagaaacagagaatgtaaacatatcgacagctactctggcttctcttaggtnnnnnnnnnnnnnnnnnnnnnnnnnnnnnnnnnnnnnnnnnnnnnnnnnnnnnnnnnnnnnnnnnnnnnnnnnnnnnnnnnnnnnnnnnnnnnnnnnnnnnnnnnnnnnnnnnnnnnnnnnnnnnnnnnnnnnnnnnnnnnnaatttttttgtctccttttttgggagcattttatacactaataatatatagtgatatgtttttaaaaagaggctataaaaagcacattattatttatttaagaatagaagggtagttataaaattatgtctagaagtaatcaagaaaggtcttgattttggtgaatttaacatacaaaatcacacacctgcttttctaagttaatataatttttcagtattgttaaaatctttatagcaatgatctataaatgccagagttaaacatggaagggtttgaacatgtactgagtagttttaattcaaaaatatccttgatatttttatataacagtattttataatttgatatactacatatagcaaagtgagtgattcctatacacagtaaagagaatttagaatgagttcttggacatttacgtaactaatactttattatactaggtttgtcacaactttaattacctttagtagacattgacctagttattaataaaaggccatttaattattcctcaaaaaggacattcagatggactagaaccgagttctgttagttttttttttttgagacagagtcttgctgtgtcatccaggctggagtgcagtggcatgatcttggctcactgcaacctctccgcctcctgggttcaagcgattcttcttcctcaccctcctgagtagctgggacttcaggggtgtgccaccatgcccagctaattttttgcatttttagtagagacagggtttcactgtgttagccaggatggcctygatctcctaaccttgtgatccacccaactcggcctcccaaagtgctggggttacaggcatgagccaccacactcagccctattagtttttttttagttaaagctaaacactgaaaaatgttgtggttgtggtttatgctttatgtttttcagataggaaaggaacatgttggcttgaaggctgtgactgaaatcctccaagatattcagtataaggtaagtcattatttaaaataatatagaaatactggttgtgtaggagctccctgtgaccacctgcgggctcgatgctgtgttagaaggactcacagatctcagaaaagctgctatccttgtggttatggtttattacagtgaaaagaaatagatcaaaaagcagagggaaaaggcgcatggaatgaagtccaggggaaaccaggcacaagcttccaggtgtcccctcccagtggagtcacttgaggatgcccctaattctcctagcaatgatgtgtcacaacatgtgtgaagtgttgacaactacggaagctcactctagccttagtgtcccagagatttattaggggtcaatcatgcaagcactaaacgcatgcaacatagctgactcagctannnnnnnnnnnnnnnnnnnngataaaaaaagctgataaaaagacaataagggcacattttgacttatatttgtacaactgcagtggactgagaaaatttcctttatttcatcatctaataggacaccagtcattatggaattcagggggatcggggaggcaagtaagctagattctttaatgtttgaaatagtcccagggagtcaggaagggacttggaggttatgcaataactttccctattgcatctgtatcaatagagaaaaatcttttaagaaacatctgagtcacatgacaggactattttcctctaaagtctaawcaatttaaatgacatgatttaaaatgatgatcttaaatgtgaattgttgaataagagcacaaatgattcccttgaaatttgtatctagctttgataaacactgatcggaacagaatatttccatctatatcagatctccctttccagatgaggagagcatctagcatagatcccagagctgagttaccaaatccaaataggacaagacaggaagttgcaagcctggttgtaatgccggaaaggttaggagctgaaatgaaagcaagcaggaggaaaggcattttgaaaattcccccatccagggttcaggcattttacaatgagaatttagcccaaatctctgttatgaatgtgctcagagcagaaaaggtaactgacatggggcagatggggcaccaagtgtaggttccacaccaggacttacagggagaattgaactgtggtagcaaagaaaatagccatagaattagagcaggaaccagacaatgttactccaatgagaaggtggaaggagatacccacaagtctgtgggacctgatgaggccattcagaaaagacttcattctaattttttagttctaatagattttttattctaaaatctagaaatattacattaacattgggtaaatatttttttctttttcaggggaagtccaaaacaataccttgctttaatcctaacactttattaccaggtgagtatttacctgattgcataaaatgaattttaactgtggctatagtcacattgttttcttcagactatgtaaaactatatattgttaattaataaaacttatttgcaatttgtattctgtttagcagataccatttccagattactctaaatatggaagtaaaccttttgaaataataaagagacactttgccactagttccattgatccatgaagagctttcgtaggattgtcatttgtaaaaattgctacctctgtgtaaagcatcagtataataaaataactttggctgggtgtggtggctcatgcctgtaatcccagctactcaggaggctgaagcaggagaatcgcttgaacccaggaggtggaggttgcagtgagccgagattacgtgactgcactccagcctgggtgacaaagtgaaactctgtctcaaacaaacaaacgaacaaacaaagaaaaaaccttcatgtacttctaagattgatcagtggagttcttaatctttagagtaaaataaactttgtatctaattttataaggttacctctctgcagtaacactattattatgtattattccacttgtatttctgtacagataacaattatacattaagtactcagaatatgatttaaaggttgttgtatataaaattttgatcttcacatttctctgcccaaattatgtgctgtcccttagtgttttaaacaaaaccagttgatgcattgtatcttctattttctacatttaattgctctacaacaaaccaatttctatcgtatgttaaccatttatccatcatattagtcataaattcctctaatgcagagctaaaggatttcataagaatgactcattttgttttattgtaatatgattttagtattttgctgttgcagaagcagtatagtggtagctagaactgaatggttaaaaatacaggctttcagacagacatgatcatacctatgtaatcccaacactttgggagactgatgcaagaggattgcttgaggccaagagtttgagactagccatagccagaccttgctctcaaaaaaagaagaaataattgctggctgtggtggtgtgcacccatagtcccagctgcttgggaggctgaggtgagatgatcgcttgagcccaggagtttgaggctgcagtgattcatggtcacaccaccacactccagcagcctgggtgatagagccagaccctgtctcttaagaaaaaaaaaatacaggttatgaagccagattgcctgaatttgaatcctggctctgccagtgattattagctgagtgacctcaggcaaactactactcttttgagattctgtttccccatctgaaatataacattaatattactacctatctcactggtttgttgtgaaggttaaatgaattaaagtaaattgctggcacgtcataagcattcaataaatattagatatgaaataggtaaattctttaataaagtgaaaaaacccaaaatatagatacacttctaaagtgattaaacttgacaggtatctatagtaatccattgatagaaatcactgtaaataatagagaattcatcatgctttttatcaattattttctccacaatgagtagtgtaagactgtggggctctagtttaaaaatgacatccatcttagaagcatcatttggacagtttgtaattttgaaaattgttgttggagtcatcaggattgttattaattcacttgccttttccattacatgtccacgtggctgtgcagaccctctgctgcgggattactgggtgtatgaaggctctctcaccatcccaccttgcagtgaaggtgtcacctggatattattccgataccctttaactatatcccagctacaggtgagtgtgctactttgaatctttcagagtgaagttctgagttaaacattgtttctgagaaaggaaaatgtctgttttgtgttttagcttcctgtagatcagtcatacctttccagatgaaagttaaatggcttgaactagtgaaagtgattgaaaggtcaaggatggacagaatccaacactaatttatggtctatattttaaaagttagtttttagagagttaatagaaatcactgaaagagcaaaactttttattagtctagttatttccttatgtgaatttccccaggtgtggagaatggaaagtctggacgtaaagtggggatgccggttatttctgtaagtcactcataggctttgaaatagttttgccttggtgtgtacaggaaaattctgcatgtgcggggtgaaggacccagaaggagtgccctagaaaattctggattgttttctagctctacttttggtcgcccacccccggccttgggctcttcataggtgccctaaatggtactgcacggtgggtgggagcatccaactgaattgtcactgggatgttagctggtggaacatgaggcagcgccactcgaatgtatttaagccatgattttaatattacagaaggggctttaaatatctcctgtctttcagggatctgtgtaagggatggatatgttctggagagctatattgtttcttccatgatcaacctcaaaaggcctgggaaatactctcagcaaaccagttttctttgatagcttttaaatatttgcctttaattcttgaagttaaaaagctcaagttcactaacttctcagtaaagctttctttattttgtccttaaatcttaaaaaaaaatccttcttccaacatttaataatttctctttatttctgttttgctagggattaatttaaaaatttccccactcagcctctcctccccatacccttcattattttatgaactttgatcatatcacttttgaaccttcatatttttatgacaaatcctaattcctatatttagtcattcatctatttgttcttataagagactgttctccacatgattagattaggggtatgggtttgagaaaaacaactgtggaggtgaagggctcttgtcatcacactgaacaggggtatatgctgccaatactcacttatcactagtgatgtgttcttgtttcttagtaccactaaatgcactttgcttttaatttaaaaatgaagaacaaaaagaaacccttcctgaatgctaactggacacagaagataacaagattaaaacacagtctttactctcaaaaatttcaccatagagttgggggaggcagatgactaaataattaacttgataataagtaaggtgctctggaaacacatatggaagaaacccaacccagtccaagaggtttagggaataatttcagcaaaatattagaagttagtccggtgaaggacaggaaagaagttagaaatttgggtctaatgttaagcctagagttttggattcacgatatctagatttgggacttaacagcgaagatgttggctgctgcaacagataaacctcaaaatgtcagtggcttaacacagtagaaatttatttcatgctcacataaaatccaacatgtgtgtttctgattcgcagtgaaggcttttctctgtgtagtcattcgcagtcattctgtatagaaagaaacacttccatcttcactgtcctcctcccacagttgccctcagtgaaaatagggcgaaggatctcaacagggatcttttgagggccagtagtagaaacagggagctccacttgtgcttgctttctgttagctagaactggtcacataactacccgaacggcgggggaggctgggaagtgcattctagcttcatacccaagaagaaactaaaaaacagattcagtgatcagacgagctagaattcctggcgccatagctcaagctgagtaggaagacaagaagatagcccccgctgagtgcaacactgcagtggagatgggggagatgatgccttcttaggaactaaggaccaggggtcttgagaagaacagggagggagtgttgccaagatgtggaggaggagggggttaatactgagaagtgctgtggacgagtgctgccaacccaagcatcaaataactacaggaccttttaaaaatgggcccaggtgttcagagttctgaacttctggcttccatctggcttaaattctggatctcagcttgttcatgtcctctggtacctaatgttttccctagctaggtatgctcactgcttgattctggttttagtatcctcctctgttgctgagttttggcttcccttctgcaataccattcctcctccatcccttccactgtgctgtttctggttcctccaggtaagtaaacaccttagcccatctaagcagtttgccttgaggcccctaccatgatgaacgccttcttttcttttctgatttgcctcatcactgcaaacaagattcatgaacaagagctataatcgccagttaggccattgttaacccaaaggagatgtttccgtagaatgttgagctgaatgtagagggaccaagcataaatatggaccatatatagaccatctttctagaagttttgtgggaaaggcaaggagggwtttagggacaacgtttagagaatagtcaagtgttttttttttgtttttttttttttttaagttaagatttaggaaatactagaggttttgtaggcatattgaaaataatctgtgaatacaacagttgatcccttgatatggtgactgccgttatcattccyaggtttcagatgaggtgattgaggcctagggagattaagaaacctttgcctggttgacacaggtagtaagggtggatttggggatccagccagtcatgtgtgatgtcagtgctgggtgcttaactcctgccccttttggtgtgccctcttcaacactgcagtttatttgagacctttctacatgaggccttgtcaggaagcccccagcagtgttagaggaggtttctgccttttctgttattatgttctgtatccccagttggaggagttttgtttctctcagacagttggaaacacatgacaagaacttcagaggctgaggcctaatgtgcagatttagggatccttagcatcaaaaaaagagcagaataggccgggcgcggtggctcatgcctgtaatcccagcactttgggaggcccaggcgggcagatcacgaggtcaggagttcgagaccagcctggccaatatggtgaaaccttatctctactaaaaatacaaaattagccgggtgtggtggcaggtgcctgtaatcccagctactcaggaggctgaggcaggagaattgcttgaacccgggtggtggaggttgcagtgagccaagattgtgccactgcactccaggctgggcaacagagcgagactccgtctaaaaaaaaaaaaaaggcagaataacaaaagaaataagacacccaagaaaagaatatgtacagagaagagtcaagtagtgaggatgggagcatacagtcccctgaggcactttcctgaggctgataacttcctgaggtatcctttctaagactcttctaaactggtaggaccccgtgcaatgcactcttttctgtttgctatctagttgctccaggtcccttctcttgctgactttgtatttctgaagcagagaaggggtctggggttagcaggcatgtgagggccatgctcactgccggccgccccatccaggtcagactcagggactgcaacacgagcaggggccgtgggtcgtatagtcactgttgttctatgaatgatacatgtaaaacatcaaactttcctctgcatttacttttcctacaatttgtctcgaggatacatacacatttttttgttgttgttgcagatagccaaagtcttagatgcccaaatttcaaagccccaaggcttaacatacagcatgttttatgatactcgaatgcattcatttgcttttacttgtcattgaccctgttaatacaagcagtgtattgatgtagtaaggtaattatgtcatagtcctagcttccttttttttatccttttcataggcagtttttagcatgtgaaattgctcctttgagactgatgtggagtctgaaggaatgcatgcattcattcattcatttatttggcaattattcgacatttgctatgtgccagttactggaatcagtactgacaaggggagataaaaaagacactctcaaagaattcaccatctaggaggaaaggccagctgatacataggtgtacataaaaaaaaaaaacccagtcatttgctgtgtccagcgctatgggatggtatggacgtagtcttgaggtagcacataggaaaggtacctggatgagagctagttatctagaaggccttccccaagccaggtcaagaggtgttgtctgagtattcgtggggaattgccaacaggggaaaaagtgtctgtatgcttgtgtctggcaggnnnnnnnnnnnnnnnnnnnnnnnnnnnnnnnnnnnnnnnnnnnnnnnnnnnnnnnnnnnnnnnnnnnnnnnnnnnnnnnnnnnnnnnnnnnnnnnnnnnnnnnnnnnnnnnnnnnnnnnnnnnnnnnnnnnnnnnnnnnnnnnnnnnnnnnnnnnnnnnnnnnnnnnnnnnnnnnnnnnnnnnnnnnnnnnnnnnnnnnnnnnnnnnnnnnnnnnnnnnnnnnnnnnnnnnnnnnnnnnnnnnnnnnnnnnnnnnnnnnnnnnnnnnnnnnnnnnnnnnnnnnnnnnnnnnnnnnnnnnnnnnnnnnnnnnnnnnnnnnnnnnnnnnnnnnnnnnnnnnnnnnnnnnnnnnnnnnnnnnnnnnnnnnnnnnnnnnnnnnnnnnnnnnnnnnnnnnnnnnnnnnnnnnnnnnnnnnnnnnnnnnnnnnnnnnnnnnnnnnnnnnnnnnnnnnnnnnnnnnnnnnnnnnnnnnnnnnnnnnnnnnnnnnnnnnnnnnnnnnnnnnnnnnnnnnnnnnnnnnnnnnnnnnnnnnnnnnnnnnnnnnnnnnnnnnnnnnnnnnnnnnnnnnnnnnnnnnnnnnnnnnnnnnnnnnnnnnnnnnnnnnnnnnnnnnnnnnnnnnnnnnnnnnnnnnnnnnnnnnnnnnnnnnnnnnnnnnnnnnnnnnnnnnnnnnnnnnnnnnnnnnnnnnnnnnnnnnnnnnnnnnnnnnnnnnnnnnnnntgtgatggttagagaagccatgggagaggcaagtttcaagaaggagtggacagattacgagtgtcagattctgcacacacattcagttaaggactaaaaagtgataactggatttagccacaaggagagattatagacttgagaacaaagtagacgagctgggtgtctatggtcacatttgttcagcattactttatcgagggtaatttcctaaaagtagatcagatcttttagtgaaactttttttttcttggccaggcgtggtggctcacgcctgtaatccaagcacttcaggaggctkaggtggacggatcacctgaggtcaggagttagagacctgcctggccaacacggtgaaaccctgtctctactaaagatacaaaaattagccaggtgtggtggcaggcgcctgtaatcccagctacttgggaggctgaggcaggagaatcacttgaacctgggaggcggaagttgcagtgaaccgagactgtaccactccactccagcctgggcaacaagaatgaaactccatctcaaaaacaaaaatgttctttataatcacaacaaatcttaatttattgaaaggtttagatttgttgagtgcccaacattcccatttctacctagaattcctttaaggattcccttgccagcattcacaatgttaatgctgaactatattgagaatgttaacggatcctgtagatatgatacaatattttactactatactggccagtgtattatgctaagatccagagacagaccatcgtgccttaggctctctggcttcaaagggaacctaactttgtatttttccttgaaataggccagtgacaaagtctaaccctaacctactaaagtcatgctccctgatgattgggagataaaccatatcttaccacaggggagccgaagctgaatgaatgcatattagaaggaataatctcaactgcccttcaaaatagatgacttttcaattagctgtacttctcaaggaaaagatttaggtgctattagcacagagctccatcatagcatctgttcagagggcagcagagttaaaatgtagacacacacagacacacatttacgtatattaaaaatgtaatttagagtgatttagaaaaaattataatcttaggggaatataartcagtctgtccttgaatgttttacttggtgctgctcatagaatttcacaggaagcagagtaaaaatggaaaaggtccaaagaaggcagcaaaagtgagaggaatcaaaagaagagaatgtgattctaggagttagaccaagaaaaattgagaagcctcaagaattgagaaggggaggagagagatgcttgacatataacatagcaaaaggaacaawgaatggcaggtagtttccacatagctgattatattgagaaattaaaaattttgcattaaattaaagagcagtgttttcttctataccataaggtttatgtatgtaattaagctgctgaatattattgtggaaagaattggtatcttgacatgcatcacctgccataggataatagtattggcactagcaacattgaagttctaaatcataatggtttcctattaaatgcatagtagctgtgattcagggaggtgtagacttcagctgaagtgtagtgtggactgttaagcccatcatacattgtcctgagtactattaataggaattctagaataggaattctaaaattggaagccccttcttagctgaatttttcatattattcctggttagcatgccttatgtagggagaaaaaacacaattgaacggatctgaatgagtatatatttcttttttaaaaattacctctaaccattacataactttattaaaatttttttatttccataggtgtttagggaacaggtggtatttggttacacgagtaagttctttagtggtgatttgtgagattttggtggacccatcacccaagcagtatacactgaacccaacttgtagtcttttatccctcacccccttcccaccctttccccctgagtccccaaagtggggatccggtgtgtgtgtgtgtgtgtggtgtgaaacaaatacctcaacatcacttttttgcctctatactttgtcttttgcaaatgccaaaattcttactacagatgcaagagagtcccttaaattttttctgtggtgcttaactaccatttttggccaaaattatatnnnnnnnnnnnnnnnnnnnntgtcgtgtttagaaatgagattccaagaacagaatacaaatactaaaacattaccaaatctaacaacagaaattttaagacatattctgatttcacagagtcattaaaatgtgaatacatattaatcttagaattgatagaacagggtattatggtatagtgccatctgtgcaaatacatatgtacacatacagaaatgggttgataattaagttttgctgtccttttcctgcccttttcttcctcctttttctgcattccctccctacttatctatttcttagcttatctacattttcatattaaatgtctgttttttcctgtctctttcaccttaaaataacaccactgaaatgaaggaatatgaatgtgtttgttgttttttcaccctgtggatacatgatacgtcttctagaatattgaaaactgctttaaatgttcttttcttctgtctttcctcctcttcattccctctgcattccatgtttcctgtgggttggaaagtaggactctttacatcctgacagcccgagttagtgcctggcatgtgctcagcctgtgggatctggaagcacatctggccctggacaattgaggaagtctgaccccattcatgaagcagcaagtctttctcaggggtcttcatgctccatatggaatcgaaggggctgtttccctaaagtccaggttgccgtagggccacagcatggttatgtttgacaatcacttcaaatgattgggaacatttgttacagattttcaatgactgggaacatttgttggagattttcttctctgtcctttcttcaggacccacctgaatgggtcccctctgacattcaggtgttgccaatgtgatgtattaagacatgggacctttaagaggtgtttaggccatgagggtccttcccttgttaatggattaaggcccttaagaaagaggcttcacacagcattttcttgttggcttgcttgtccttctgccttctgctacatgaggacgaatgaataatgccctcaccaaatgccaaatgtcttgatcttggacttccagcctccagaactgtgagaaaatacatttctgttctttatatatcatccagtctcaggtattctgttataacagcacaaaacagatgaagacakccatggttttcagacttgagcatgtgtcagatcccctggaaggcttgttgaagcacagattgctgsgttccacccctgtgttgctgattcagtaggtctggggtagttgctgacaacttaaacttttattctgggaggatactttgagaaccactgtttcatatgtacctgcattcgtctttacatgtaattgagatcagcgctataacccgagaatgccgaggtcctgaaggtgcgtgtgaagggcagcgctaggccagccctgtccagtgggaacatgatgtgatccacatattaaactttctagtagccatggtaaaaaaaaaaaaaagtcaaaagaaacaggtgaaattaagaaattaattcaaatagtgtatttaacccaatacgtgcaaaatactatcattttagcatgtagtcaaggtaaaaagttattgatgagatttctctccttattttcatactgagtctttgccttgcagtgtgtattctgcacttccagcacatctcagattggacaagccaaatttcgagtgcttggtggccatgtgggcctggtggctgccatcctggacagtgcaaatcaaggatcttctctctggggagactctttcttccctttcttaaaatgtgttatttttaattgcttgtagagatttttatatgtattttctcagtgtcttaagtgataggcagcactttccctgtggttgtgagctctctaatctgtaattctttagtatgtttaaatctgtgtggctcagaaactctcttgaggtgatgagggccgacagcggccaaggctgaggctcctttaggctggggatggcttcaggaccgttgacgtcggtgttaccagggagtgaatgttcttcctactctcttcctcaaaaaaattgaaaagatcgattaaagagtcatgacagagtgagagttggtttatgaatgagaggttggtaaggaagagggagcattggttttagatagaacattatataatggggtagragagaaatgaggcaaaaacaaggctgcagtacatgaaaggtggagagtcctctctgtctatatctgtcyctgtatacatatatggactgtttaagtacaatttgcttttgactttttaatttgattagtaccatttggaattgtgttattctgactcttgttattgataataaaagaaagtgagagcactaacttttataaagaaccattttatcaaggtcataaaatatctgtcacctcccaaagtttcctcccatgtcctttgttgttaaaatattttactgggtcagaacgcttaacataagatctaccatcttagcattttaaagtgtacaatgcagtattgttaactataggtactatgctgtataggagacctcgaggacttatttatcttgcataactgaaattttgtaccctttaaccattacatccccatttctgcttcctgccagctcttggcagctgccattcttctctctgcttctaagagtttgattgttttagattccacatataagtgagttcatacaatacttgtgtttccatgtcttgttgatttccacttctggatatagattgaaagaaattgaagtcagtatcttgaagagatacctgcactcccatgttcattaagccaagacagggaaaccacataaatgtccatagatgggttaatggatagagcatactgacttttatgtgttgtatttctcttttaacatgatgacacatgaaatgcaagtgaaaataaatctattagaacttgggaactcctgaaagttaagtagccctaaactgcaaaccctggaaattagccctttgaatgcattaataaagaagcagttttaaagctgaacttttagtggataatttggtttttgaggcagtgaagattggaataaatgtcttagaccaattggagtgcacctgtcgttcaaagaacagtggctgttgaatctagtaccttcagaagatggsgacttctccatgaaatgttcaatgttggtgccccgcattcagttttctcttaaattggttaaaaacaaataacacatactatgtttaagtggagtagcattaacaatagatgcagtcatacattcagatatatgtgataataatggtctctggaaggccttgacatttgagtttcattaaagatttctatcctgaaatattattctattattctgttcatttatcacaatctctcatttcagtgtggctgattcagtatgcacttgaaaccatttgaagtgactaaagggttttgggggtggttgctttagaaaaattggcatttcagaaagacacattttcccctccatctctgttgatgttggaagtcttcaaagtgttgctgtgatcagagaaaaacattycttgtgaaatagttttctctgagagtacagtgatttgagactggctggctgttgattcagatcatctcttctggaagaagttgttttcacagaatgtgcttcagggtgaggcctggggcttgaaaggtttatctccagttcagaatgcataaatataaaattaacccagctttaaaataatcttcaaagtcaataaaaaatggattctttcatatgttgaggcagtaaagttcccagcccacattgctcctcagtgacctgtgcatgcttcataggttcaggttgcaggtattaagtatgattacatggaaagcgaatgctaggagagatgactttaaatttcctcagtgaaattattggtttattataaatactttctgcatatacaactgtagctaaatatttatctcaaagtgctgaaggtttcacttcaaaagaagttgtgcaatagaagtgctagtatttgtcagacacttcctatgtgcttggaactatgctgagtgattttcatgaatgttctttcttatttcctaggctatccttgtgaatactgttattattatgtctgttatacacatgtggaaactgaggtttgaagaggtgaagtcatttgatcktttgggtcttaggtggcagagcacgacaagaattggcctttgggtgcagagtccactgccctcacygtgatattcttctttttgaaaaagcataagattctctcactgaccaggttccttttcactctgtacttagggaaaactttaaggtgaaagcaaataataagggattctcatgcagcttcgtctctagaagtttttcagatgcaacaagcaatagatgctactcgtattttcattctaatagctgaagaagatctagcgaaaaaccatcaagtagattaaacagctgattgcttatctgactggcttctctatgtaaatacagcatataggtacaataaaaaactaaacaggacaatcccagttgggtcagacttaatctcattaagggaaatcaaccagtattcagtgacatggaaaaataagacattcgaagcgcatgtaagtacagagagaaaaaaaaaaaacccacagaaaagaagctggctttctgacccggattctaatygaactakccgtttaatttttttccaactctatgtatgagtgtgttgaattagaatgttgtgggattcaactcttggagtcagggagcctctcctgaggaaaatgcacatgtaaaaatttgcatatcattcagggctttcgtgggccccctaaagtctctataggtgtctcttgactttgttgaaacccctgaattagttgctgtcttgtgtttcatttcyctttatgaatggyagaattctatagctatgtcatattaaggwtctttgtggatataatcccttgatacacagatggtgaacttttggtggattgatgctgcccaaatcacgtttgctcaataccctggggtatgtgaaggagatagattatattgaattgactagaattcctaaagagatgactgtggagctgagaaaagagcaggtagacttggaattgtcagacttacccactagctaatctggtaattttcaaaacttccagcctcagtttccccttctgtatatggaatgaagaatgtgtcatgtgactgtgtggcacttaagtgaattaacagacaatgaaccctgtagttaaattgatagatgggaataatcctggggaatgctcatcacttttgcttgttgcttaaacattagtattccccagagagtcacgtctggcaggctctgggttcttagagaaactgtagggtggctgatgggcaatgtccctgaggactctgagaaccttttcacttacagtggggaagccatgggacctggagagcccacctaataaagggaaatgaacttgaaaatcaatattgtaaagacaggaatttgggctcagacttttgaaaaatcatttttttggacctgtgctctccagagggctagaaaagtggcaaaagtcttttgatgaaaggaaaccttgaatctatctgataaatctaagatctaatcagtgtttacatacagtaacataagaatccattaattaaaatgtacttggaaagcatttaagagcacattcatttgttcactttttcttattatgctatagataggcataaaacctttttgggagaggtttgtatcattgttttttggagatggagtctggctctgtcactcaggctggagtgcaacggtgtgatctcggctcactgcaacctccgcctcatgggttcaagtgatttctcctgcctcagcctcctgagtagctgggattacaggtgtgcaccaccaagcctggctgatttttgtatttttagtagagacagggtttcaccgtgttgatcaggctgstgttgaactcttgaccttgtgacctgcccaccttggccacccaaagtgatgggattacaggcgtgagccactgtgcccggcctgtatcatttttacattaacaaatggagcagatttctttatctrtttgagttgttcagagatcttgatatgtctacttctgttgtcatttcttgaaagggtcctctctaacgtcttaggtctggaagaattaagtctgttttttttctttttgaagcttaattttaattttctcttcaataattcttgtaatttatacatattttatgcatgtcatttatgaaactccaatcttgttaatgtccgataattgattaatctattttcttctgcttttattttcagatagaagaatttcgaaggctgaggacacatgttaagggggcagaacttgtggaaggctgtgatgggattttgggagacaactttcggcccactcagcctcttagtgacagagtcattagagctgcatttcagtagccaaagaggacaggaacaagtctgtcttcatgagggtatgtccagattaagtaaggaaaatgaggtgcacagctacttaaacctagcgtaccaaaggtacacttattgtgatcctggtaatttagtaataaaagcgtatgtacttcatcttgataaaatttatgacacattcttgagctctgttaattacaggtcaagtaggtattttaattttatgcagtattgaagaaaaactatgattatattttcctatcagagtagcctttaattccaagttttggtggctttcataagaacagacaccctcaggcccagaaaaagtgacatgcatgcatacctctttagtaacttaccatgttgtccccgtgaagcagcaccagtcatgtcccagtgaccaaggagcacataggaggggacttggggagcgtgtgagcctcagtgtggacccttctcgtctcctgcagaattgatcctyttgtttctcaggggagggagcatatctggcatgcattgaaatacttcttctatggaagtgccttttatatgataaattgagaagcacttattaattatctgaatatgatacactattgattgaaacataatctatgtattttaatatatagaattcaatgtatgtattccttactcttaaggaactaacaaaataaaatatcacaaacacggaagagataaaatataaaacaractatatattggattatttatttaccttgtaaatttcctaagtgcataggtcattgtacatcactggcaaaccacagcttcccaaggggaaggcatctgttggaatagaacctagggaagcagygaaatctcatctctataaacaatttaaaaattagctgggtgtggtggcatacgcttgtagtcccaactattcaggaggctgaggtgggaggatcacttgagcctgggaggtggaggccgcagtcagctgagatcacaccactgttctccagcctgggtgacagattgagatcgtgtctcaaacaaaatgaaacaaaacaaaaaaacgaagaagtctgccaggtagccagggtgatagatgcggaggcttggacactagaataggaacagtggaggtggagagaagttgatgtatatgaaatagaaatcgcaggttatagctagtgatgaattggatgaggggtggagggagatggaagtgtcaaagataaattccggggtcttacactttggaaaccctggatggagtgccactgagtggcagtgggaaagctgcggggaggccctgtttggttgaagataaagagttgagttgcagcacagtgagtgagagatgcctgtcaaccacaaactgcaatagcggactctggtcatgaaggtcattagcatttcaagagtagagaacagaaaacaagtctgggttgaaatagggacgtattgggtgtagacattgtatatgttcatatgatgttctgatggatctaatggggttacttaattaagtgtgcataaaatcttgtgggaggctttacagacaagttagccaagacacagataagttaggttacgggccaaagtaatacagtgattgagcagtggagctgaaggagatccaggcagcttgactggcagagccctttttcttcaccacgacatgggcagagsttagagagttttgccacactggcggtcgagtgacacatcaaggagggatgtggttgcagcaggctaaaggccataggaagggaggagctggagactccaggtcgcagccaccttggtgggctggggtggggcaggaggccgcagcaacagagrcggggtgggattgaagaagtctttttttttttcttttttaaacaaaagaaatagaacttgtctatatgctggggtgtgggaaaggagcaagtagatggagagaggctgaagatactgcttctgggaggagctggagcagtgaagtctgaaaagttgaaagggatgaaatcctaagcacacagggagactggcttttgctgagaggatgggcactctctgtgctgcartgggaaggaagaaagaaggaggtggtggtttagagctgctgtgtacccatgacttgctcttaccatttaatgatgaaggggcaggagctaggagtgggagagcagcagtgaagatggataggagcagaggaagagggaaggatgtgttcacaggagaggccaagaggcagcgggggtgggatgagggttgcaaagcgtgaatttatgcatttctccagtctaggtttagttagtatactccctgtgaatgtcaatacctgtaaatgatacttttaatgaagggagattattcccttgaatgtttggtttgtatcttgtcctagaccagagttgccattctctaaatatctaaatgactattattattttctctctctcttttacacacacacgcgcacacacacacacagagaaatgttgtttatgagattttgtatatttcacatacttcatattctttatatgatagatgaataatgtgtagtttttcaaagttttgagttaattacaatttaggtactatttctaaaaggaagatatatttgtgttcttactttggtggctgagattacttaaaggggataatttgctcccaaattcctaagaatggtacaggaattctaaggtgactaattcttatttcatttttttatgaatacttttatcttgaaatgtgtaatacaaatctggtcagagttctatataaaaattatattgggaatcagacttatgtgtgtgtactttttatttgatatttaataatgccctaaggcaggtaattcaaatttttattaaagtgaaatgatttgacagtcagactttgaatttaatgcatgaatgtttcatttaagctcttggaactaaaaaggaaaagacatttctctggtagttgttctctaaaaaatgtttaaaataattcagatatattttagctatgttttactgaaataactttagttttagacttaaaatgacagatttttaaaaaaatgacatgtctgggcacctggaagactttgataaccaagctttattattcccatgagtaatctgtgactttttatattaccatttaagaagtatgaactatgattttgtattatacttgtttaaagaattagtatgtaagtcatccaggtgctggaaattctttggttcagcggtgctaattcagatttatgggtgcctattgatattaaatgatcctttacccattgaattttctatatgatgcaggagaactaaatgtattttaataacaatgaacaaatgatataacaagtttaaggtccagtttacttgttacttttggtatcatgacattggtactcatcttccagcaaaatgattatttgattatttgcctttttacttcatraagtgttagcccatttttaaaaggctrttctgacgctcaaagactgtctcgcttgtgacctaaatattgttaagctgtatacatgtttacagtaactataatgaattataattattttctgtaaaaagcaatgtcacacggctctttagtttctctttttttctgccttaaatgtggaaaaataagaatgccctaaatacgttaaaaaagaaacaaagccagaaaaatggggttattcagcaagcatctccaaatagtcccattgtcaaacttgcccttatttttcttttgggatctttgaagttatccttgactgttgaactcttccctacttgtacttttgcggttaataatattgtcttcttagctttaataaagctataacaagtatcaatttcatatcagtcttctttgataacctaaaagagttacaggttagaagagggtaaggcattatagagaagggggtgcctgtgtgaggaaaggaaagtgagaatgttcactctgaatgaccaagtaggtgaaagctattatccttccagattaaatggaaagctcaaagccatattttcagtcagtagaacttggactctcctctgataatttaacatggtgcacagcattagggttagaactgaaggctctacagatgtagctgttttctatttattatatctcatagaatttcctccaactggaatggatttcctaccagatctcaaaatgatttcagtaaaatgccaaaacaccaaggatgctcagaatacctattatgttttgattatgtgatataaaaattattaacccaccaatgaaaaatacaagagctgtatgagctctcttcaagattactaaacaaagaaaataattcgtgctttaaaatatatctcttcctttttatgttttagaaatgttaataatttatcatggataaaaatttcagaatgattttttcctcccactatgaattaaaacaaaattgtgtttgggaggaagaatgttttgcagtcatgggccaacttgtatgtcgaatgttaatatgttctgataccctagatacagtagatttcatgattttaaacctaaagaatatatttttccataaggaaatcactgtgaccagtttgtcatttaaacatgttctttcatgccttttacctcatgtatactcaaaagtggacattaaaaaatggctttcaagtatcagcaaaaggctttgaattagctaaggaaagaatttatttctagaggctccaagaaagacctttcctgtaagtaggtggtttaaatcttgagtgggtttttgaggaagactaaggcattaaatacttgaggttcctaggtggtttaggtgggaacctgcctggacagggattggggaaatgttccaacagacctcacaaaggcccttcgagcactggatattatagttccctggtttatgatgaatatgctttcctgtgtctctattaaatttatcatggaaaagagaaaccagagagaacaggaagcaggtaaatgaggaggaaaatgaagtgaattttttttatgaattaggttttgttagtaagtctccaactgaaaacataaagcttaaaaattcatctaaggaaattactaaaaatgctaaaaaaacaagtgcagaaatcattggaaatcacctatactttaatcaggagtataaggagatacttttttaaaaaagcattgaataaatttgttttaatattttctgtacctcttaaaagagggtattatagaagcagtagtatcaaataaagcttttatgtcagcatttcattatgattaaaaatcttaaaaatagagggaaaatagaatcaaaataggatttatactgagattactattttttcaattggaaaaactgagagaattgcctaaaagtctacctcattcagattaaaataaggggttaaggaattgaaactttattaaaaactggattgttactaggcagataccaagagttcatattagaccgtgtaagagtagtgacaatcagggaagttatcctttttctttcaataaaattttacctgaccttcagttttctatttgtaagcatctcatttttcttttttttatctccaatcttagcaccttgacaatttgttttagctgtctgccttttttgggtcactcctagaaatctgccaacctaaagtctagaatgttctcctctctgttttctgtttaaatgctgttgatatttgaaggaccaggttttacctccatgaagtctttttcccaagtaaactgaccttactaatccttctttgctttctgagtttagtaccatgttagtttagttttaaattattatttttttttgttttctactgcacttagcagttttagttttacttactccacgagactataaatgtctacgtagtagagtcaaacaagtttgtaacatacttcattaagcaggttttcttcatgcaagacttctgagaatctttactatgccagggacctatgtgaactccaagagggtatggtatagtatacagcatttcacaaatttatttaaccagctaataatacgagattgcagaatatgttttggtaagtgctttggaatgatccaaagcattcgttgtgatcttggaggacctaaaatagggagtatggtagagtctacaggtgggggccagagcccatagatgccccagcctctcctccacatgccctttagggatggaaggttgaatcctggatgtgtgctgagatcttgttaagctatcttagacacagcatgaagtaagtgtaaattaaaaaatagtttttaaattttatacttgagttaaaggctaacaaacccttcatggaaaccctccagtagtaataataatttgtttgtaataaattgcagtgtgccatagagtgccaagaactatgaggtgcggttcatatatgtctcatttcacctcagaacaactcttcaagatggacattgctttttgaagattttatcaataaagaaactgagtcctggccagtcgtggtggctcatgcctgtaatcccagcagtttgtgaggctgaggcaggcggatcatgaggtcaggagataagagcatcctggctaacatggtgaaaccccatctctactaaaaatacaaaaaaaaaaaaaaattagctgggaatggtggcaggcgcctgtagtcccagctactcaggaggctgaggcaggaaaatggcgtgaaccctggaggtggagcttgcagtgatccgagatcgtgccactgcactccaacctgggcgacagagcgagactccatctcaaaaaaaaaaaaaagaaactgagtcccagaaagtttgtcttcccaaagtacataaagctatcaaactatacaaccaatgaaactgatggaaacagtcatttaaaaataatgcccttaaaaattcagatatttattttgttatattggtcaattctgattctgaacagctttcagctttcaaggagatgattatagttgcattaaagtacaacacgaaatttaaaacttctaggttaggaaataatgaagtaaacctagttgaccaatctagagcctcatctagtaccttacaaataaatatttgtcaattaaatggaagtatttacttacttctgtgaacgtcatatttatcttggaattatttggaaattatgaaagtatgactgcaggttgtctttttcatattttagatattttattgttatatagtgatgcaacaaaaggaatgttcatttttttcctcaccaaaaaatgatacattttttaaggggcatttttagacctcattttactggatctctcagcaggttctgatactgcctgccttcttgccacgttcttattttggtgtccatatacccagttttctttctacctgcaccacctttcatcctctgcatgctacacgaatgttcttttaggaggctacttaatgttggagtccacttaatgttggagtcctcatggttcagcctttggggctgtctctgtaggtgaactcatccattctcacagcttgtcaccactaacaacacatgactcatttacattcctagactaggtcttttaattaacttctagaattgaatgcccagctgtctgtagaacttttcttttagatgtgtcaaagacatctcaaactcaacatatacaatattgaatttatggtcttccttcacagacctgcctctcttccagttttctttgaaacgtgrgycgtgcatgacacctctcttctttaccttaccccatatttccgttttatcaagttctgcagatttgccttctgatagctctcaaagccatctatgtgtttccatctttgtcatcacaacccataaagttagcgtcatctcctcatgactgttgcaagagcatctcccctttcttctacataggattgttatggcaagattaaatacaagataataaatacaagattaaataaaaatatataaaataataaaagacaagaagacctatagcactcaaacttgcatgccagctctggttgatttgtaccagctgtctggagagtgttgagaaggattctgaatccacatctgagcacagtgagagtgatggaattgatggggaggattgtggtggttgttattgtcatccacaaaataaggtagtattattggcattttatttaaatatctgagctatttatatgaagtcttttaaaaatgggccctggaaaactgatctacattagatctactgatatgtagctaggtgttagcaattattgaggaaacacagaaacatgataaaattactgacgtctcctgatttaccttcttgttattatttttatctcatttatatataggttatggttctgatgcttatgtatggcaaattgcttacatatggcaaaaactagagaatctaaaatctcagcatggaaatgaaattacataagggtgaagaaaggattatggtagtgtggagtaatttacccagacccccttattgggggtagaagccatctcccgaagaagggaaagggttacatgtcttccatttgatcctctataacaaaataccataaactaacatctaagcaacagaaatttatttctcacagttctagaggctaggaagtccaagatcaaggcaccagcaggtttggtatctggtgaggccccacttcttgttttgtagaatggtgccttctcactgtgtcctcacatggtagaaggggcctactggttttctggggtctcttttataagggcagtaatcccaatcactaggcctctgcccacatgatcaatataatcacctctctaaggcytcacctcatcaccttagtggttaagattttaacataggagttctggttagagaagaaaccatgtaacagaaaggtaaacactgacaaccctcagaagggtgagaaacatgctatttaaaaatatttttaacaagaatatactagaaacaaaaattttcattttaactaaaggtctttgagatatttttatgttggtacatatagattggcctcatcctttgggctacttcagttttacttaaacattgcagttaaaacttgttttcattacatacaaagctaaaataatctagataatgcccagtactagataatgcccagattatctaaaataatctagataatgccyagaatctgaaatatttattggataatatggagatttctccagtcaagaagtttgccaccaggtagcaccaggtaataaattaattgttaaaactgtaaaaccacattggtttcagatgggtctgttctccatttcagtgcttcttaaaaccccttcagaatctctgagttcttactgcttttattgctctgaattcttattgctcattcttttatgagttttattaggaactcataaatgtctttagggcttgtccagagaacatattttcagagacatcttaggagcacggagtggaattgtatctcaagaagttctttaatctagtttttgcctgaagaggtcttcaactaaattattccagatggttactccgcatacatagaaaaaaaccgaagcaataaacctttgttgtctgataatatctccttcagcatttactcctgcctaatgcccaaagggaaaaaaaatcttttatgagatattctacctgtaaagtgttaactgagttggaatactattttgttggtaatatttttagttttttgtaaataaacatttttttcatgaatataactggttgtatttgaagcattccaagatttttttttccttttgttagcagcctgtgaaaattcctgcaacctttatgttgcagagaaacttaacgcagttttttgcaggtatgaatgttcattcggattttagtatagatacaaccaatgtttctctaatggcatcttttctttaaataataattatatttagcggatcttagcaataaaatcattgtaacgaggaataaaggatggtaaataagaataacagtgttattaatcatctaaattagttgtgtatggaacattcctgtacctgaaatatttccataggaaataaggctaaaatacacatttacttataattagatataatacaaaccttctctcattataatagttgcccaaatcccaattcaacttaatttcattgactttgatttctgaactaaaaacattaagctcgaactagtgaaaaatgtataatatgtgcattcaattaagaagtaattagatagtcaatcacccttacaacacaccagggattagagaagaaggaagaaaaatgtgactcactgtagtgtgtaaaacagttttgctaattagtttggtgctaattgagatggagaaagtgtcaaagtatcctaacacaggtttacttctgaactttaaaagctaagtttagcgttttataatattaccaacttctatgatttatccttgagttttgatcaaagcttatttattcattctaagttacacatattagtgagtgatgggaacaaaaagaacaactgctttttaatatttcagacatgatgctgtattttgtctcatttagtcctcgtaacaatcctatgagaccggtatttttatttttcattttagagataaagaaactgaggctgagatgcgttgagtaacttgctaaaggtcacagccagtaaagtgcagagcaagaattcagacctaagtgggccccactcccaatgctgagctcttttcacgacaccacatttcacaacagcaaagtgcagaacattatgcactgtgtttatcttttgccttcttatctcttgtagataaattcctaggaatgacattcctgggaagaaagaaccatatgttttcattttttcataacatatttgctgaagtaccctctacaagggttatgctaatttgtgcttgcactgttgattgggtattttatagaaggcatttttgccatttttttaaccaattgttcaatatattctacatctctttctcatctttttactcttcagtttacatctcctacctattgaaactgctgtagcaaaggtcacctttgatttctctgtttgctttttgtttccttgtctccacatatatagcacatgttcatggtagaatattcaaacagtacagaataaaatggagcagcagcaaacgtctctcaaactctcctcttagtgatagcatccccagcactgggggttgtgatggatatggaggccctggagcacagtggagatggctcaggtttcattcagattccaccagtaattagttgtgtgaccttgaaaacgttaactgataactgtctcttgtttcatcacttaaaagaaggctatagtggtatttacctcgtagggtggttgtgaagataacaatgagataatgcaattaaagtgcttaacatttttttttttgtccacagtgtaaggattcaaaaatgttacctttatcattatgattgtccattgacctctctttatatatgtgtctcatatggttacatatatatgtaatgtatcttatgagattatactgtgcatgctatttttcaatcagcttgatgatatatcttttcatgtcattgcatagttatttttaaaatggttttacatacattgcttttaagtatatgccaaaatttgatgagctgtcatcaataatactgtggttaacttacccatttccttaaaaaattcttagaaatgagattactaggtcaaagagttttattgtaatccatatgcagattgcttttcccaagagttctatgtttatgttcccagtaactatgtgtcagattacacttttcaccttcaccagtgttgaatatttaaaatttttcatccttgccaatctcattaaaaatggctccttacattatatcatgtcctgtaaatacttggttctattcttgacttccctattctgttccatttatctgtgtattcatgtgcatcgaccacaatgtatgtggcattagtgtatatttcagtgtttggccagacaagaccctctttactagtatcttctgcaggatttttctggctatttttacatgtttaattttttcagataaaccataaaatcattttatcagaaggatagaaataaagagcaaaagaaagagaggttgagaaaaagaaaatgaaagacaaaaataaaagagaaaaaggaatcctattaggatttttaatttgcattgtatttatagagtgattaaggagaattaataccttacaatattgaatctttatatcaaggaaaaatgcataggtctatgcttattaaagtttttttatgtctgtcatgcattttataattctctgttctcacaatatttactccaacttgcatatttggtctctggagtcagcttgagtatggctttttggggaacacagcacctctatttgctgttccacaacttgggcaaactattgattctctttcagccctagtttcctcatctatgaagtggatatagtaagagttataacctcccagggatgtgaggatttcatgagctatggtaaaatgcacatcacagtgctttgtggaggattagcattaaatgtgagcaattactattattatcattatagattttgactagctatagatttttccattgkttaatttttttattgaaaaaacaatggattagatttgtccctggcttgcttattaacctttatatagttttcggtaagatttccgctgattattttgagttttccagatagacactgataacacccaacgatcatgacagttttatctccttctttctgattttatttcatttcattatctagtactccagaataatgttaaataattaacagtaatatctggcacccttttaaaaatgtctcatgtgcttggatttctgtttccaaatccagtggcatgtttccctcttctcttttgactcttcaaaagtgtttgacactcctgacctcttcctctgtttccttctctcatgacccgatgctgtcatgagtgagaatgttgaaaaagaaggtgtctatatgccgttgcttgtaatggaagggcatttatttttaaccctctgtttggtgtatggcagtattctaggggctgagtgaaaatataaacataaccagtgatcagctctcccctgacatagctcacagcctagtgtcatgggtaaatcagacacacagctaactccaggtcagagcagcatgtacaaactgcctgaggaagtgttccactagtgtacaggacaaagagccccctctgaagaggagagttcttatttctagcatattgctgtttcttaaaagactctattttggagatgttacactgaattactgtacttaaagagggatactttagttagttatcaatgagctgagccaaaatcactggaacttacatcagtactgtgacctgcagcaacctctgaggagtaagatgtgtgtgaacaygtgatttttaaatttttggtagcttttcaggaaattctccagtagtgatttgctttgcactcattcccttgggcctcttcataaaagataattcaaggttaagaaaaagtcatgtgaaagatggcatctgctataactatattgaaatagctgatgatttagaagacttcttaggatgtggccatactttgaggtcatcattatgaacactgatcattgtataatagaaaatttctctttatgagtaagcttccttattatttagatgtagataaatgaatatttggagaaaatcccaaagggaggagttcagcyttaacttcatatattcaaagtgttacttctttaggtkgttttaccaaataaatttgtattctgattactaactaatgtagttattgtaggaactttagaaaatacacaaaggcataaaaatgaacttatatttcaaataatgaccatcaattgaaggtaggcaactaattttgtttccaccacagactgcattaaaataacaggaaagagatttttttttaagtgcattgcctcacaaggatacagaagcaagagaggagacaacagccacaatactttggaagctggaagcagatggtcttgtaacagatttagcagatgtgaggaacaaacccgttcgcatgatagaatctctcaaattcccaggaattggtggcaacagacatcatctggaagctggagtaaaaggaggctaaagacatctgtattggttgaaagctatttaagaagcacttaatctctcagccccctccaaagccttggtggactggagatacttgtcttctggagatgattaagagagagactctgtacttggggacacagacacaattgagtgagtaaataacatcctcagacctcatgtcatcctcccatacactggcagaaaggcccctactctccagatgaagctggaagtatcttctggggagggtctgaccagcccaggtgacttctctgcagaagtggaccaacgggcttatccagtggtgatggtgtaataaagaggcctccacggtgccctccgcctccactctggttttgttgtagtggttgtttgccagtcccagatatgaasagttacagatatttgaagaagaactgtaaatgaaagaacccaaatcagacaataaagtgagttaaaagacataaatactttgtaagaagagaaaaactgtcaagaagttgtcactcatatatttggagaggtaaggaaagaaattgcattcacaaaaaaaacagggtgctattaagaaaggaatatttagaaaacagagcttttggaaactgaaagcatgatagcagaaatgagaacttctacagatgaatcagaaggcagaattgaaaattctcagaaattacagcaaaaggcaaaaagatgaaaaatacagtaatgtaagcaaattagaggaccagtttaagaggtctatcgtccacgtaataagctagagagagaacacagaaagtggaggagaggaatcaggcaacaaaattatccaaagcatttccccagaactcgtgagcataaagttacaaatggaaagaatccactgaattcccagcacagtagatcaaaacacactcacaccaagacaccatcattgtgaaacttcagaacatggagggagaaattccagaatggcaaaaaccaaagcaacaaacatgtcaaaatcaaggaatctggaatttgaataccagacttctcaaaagcaacgctggaagctaaggcagtgagcatgaccttcagaattctgagggaaaattacaacccaccaaattccttacctagtcaaacttttaacccagtgtgtggttacagtagtcatttatagatatcaaagccaccacaaatttatttcccagaagctacttgatattgccacaccaaaatggagtaagctaaggaaaaagatgtgggatccacgaaacaggagagccagcaaaggagaaaaaccaaggggatgaataaatgccagaatgacagtagaatgagatcataggcaaaccaggcagtcagtccagatgtgagcaggtgagaaggttctagatgagctttcttcaggaatggtgaagttgatacaatgcatgatatatcttcacttcttgagaggagagctaggcaatgggtaggtatttgtgcattgaatcagttatgagcacgtagaacacttaggtggaaaaacccaaggtatttatcactccagagaaaacaaaatgttgtgcaggaaagaaaaattaacacatgtagttcacctctgaatacttttacatcattacaataatagaagttgcataattgattcaaccagatttactatatagccatatttggaggatggggtgatgggaagatgggaagggttcatatggggtggggtgtgtgtgtgtgtgtgtgtgtgtgtgtgtgtgtgtgcatgatgttgacaggaggaaagagggtcaaatcttcattctccataggaaaaatttatacataatactgaaacaaaattgaaaggtagcaatacaatcatgccatttagctctctagtgttaaaataatcagctaaaagagttaaggagaaggaaattggtgacacataggacaagggactgatagtttcataacaaacatttaaaaactttaagcctttatatgcatgcataattttgatataaataatattagcaattgctactgtcattttgttgcacttatttatgcatgcacacacacattttctgagtgctttgggtcaggtgttgggctggagcttgggaatacggaacagatgagaccaagcattactttatcctatgaaaactttctctaaaacactgaaaagtaaacttccaacacatggcataaacataatgggccatacttcacatttatgttggagcacagtattgtagtttaatttttagctagtgagatgattttaaaatcaaccaaaattattacttatagtactatgctcagcacatgatatctgctgtcattacagtcccacacattccctaagaagtagatattgtctgagtctcagaaggggcaagtaaattgcctaaaatcttacagcaaattggatagaagagctgggatttggacttggttctccctcattccaaatccataccccagattgtgatttcattgaaacattttttcagttaatctggyatttgcagtaaacaagatcaagtgtacatttttgaggcaggtaaagctaataagatcatcatcatatgatcttggcataggtgggtgtcatttctttgaaaaatatataagtaagaaaagctcaatagcatagggtattgagtttccccatgtgagggagattttaactgagtgagtgtgcaaattcaccagcagattctacacgtaggtaaattagaattcattcagcatttaccaagaaccccctgaatcatgccctgagagcttcaaaaatgaataggacaccaacatgtatgtgcatctgttgcactgtggatgtatactaaatgttaaattctgctttggcttgagacctgacctcgtatgattagaatgactgtgtatttacctacccatattttatttcatgttttgggccatggtagcttaatatttagaaggctggatatattctttataatgaaatttcataaacttaggatacatgcttctagaccagcctctcccaaatgagttctgcagcgcactggtcctccaaaatgtgtgttaaatcaagaggtgactgttcacatatatctggagaatcctggatgtaataatatcctccttttggagatttgcaatgcacatcagcatattagagcctctgaaatggctttgaattaaagaaccatattttaacagagttgatacagtattttttaacatggattcgttttttcaaccaggttgttgttttttatggaacatagtttgggaaacactggaccccaggttatttccttttgcagaaaataaatacattgtgacctttaggccccattaactctgaattggtgtgattttacagtttgataatcaatttcatatcactttcttgaaaagtgctaaaagtatatttttaactatgtgaggtaatacacatgctaattagctcgatttagccatttcacaatgtgtatatattttaaaacattttgttgacatgataaatatctacaatattttctgtcaatttaaaaagattaaaaaatttaaaaagattttattgtgactatcatatttgaaatgtagtttggtcctggtagagtgggagcaggaaaaaatatatagtttggaaatacataacccagcattataaatattttctaataaatttttccagacattctatatatttgtatgtatctatgtttatatatgtatgcatatgtagaaatgtgtgtgtgtatatatatatatatatwgtgtgtgtgtgtgcaggtgtgtccacagatacatatatactatatatgcataattctgaaatactgcatagtaatataatttattaaggaaaggaggctattttgttttattattttttctttttttccaaaggacattgcccagaaggaggccatttagtttgtttccagtttctttttgcagtgaatatccttacacatagactctttgtatgattggataattatatgtctattataagttcctagaattccaagtccaaaagtatatgcattctaaattttaatagagatttattacctaccttaggcaactaataagactgcaaatttcccactgccattgctagcaatgctagttcaacatcaaaaagttcagtatcattgaactaaaatcttagctgatgttgttttcctatatgagaagcacattatttgttatctcaaacaagtactattgtcatatatatatatatatatatatatatatatatatattctgcatttattatttatttaatagaattgtaagtcatttgggaattaggaatgaaggggtctgtgtgctcttgagctaccatccatctgtgattattatatgtgaaatgaatgacaagaacttaaagctttatttttattatttgacatgatatacatattttttgtttgtaaaatagttcaagcattatttattttggatgaaagtatttgcttctgtgaaatcctgcattaataggtctgccatagaaataaaattatggtaaactttgtggaaaaattgcagagataacaaacttgagcacaaagatatttttgaaatttccacattttcttatgaaatttttagtttttactatctcttgtactgtaaaaagacttttcagtctgctgtggaagaatatcagtaacataatygattcattttttttttttttttgcctraaggaggaagacaatggtcctataatgcccttggataagaaaaggaaacttttgagctgcaccttcagtttatcctcaaagcctgcgttgtttgtcttcatctaatccagctttgatggacatctgtgatggttgcctgtacacttgctgaaatgaaatattagaaatggctgtatattccaaagaaaccctatattatatatccacattactgctgctaggattcatagttgcacatactgtttattgcttatgtgtagaaggaatgaaactagtttccagagttgttattaatatgaatatatatcatgtgttaatattgagaaaggaaaaatacattcccggtgttagtagttcttcatttcctgtctccaacagaaaattcactcattttagaactagtgtaattcttgataataaaataagagttttgattaagaacagcatagagcttcaaaatgcaaagtgaatgattagtaaaattatgtctcattttattttttcagcacccataccacaattaatattaggctggattgccatgggaaacattttttggcattaatgcagcaacataatactcactttaggtattactacatagttgaaggatttaactgaatgtatggatcaaatttatttatttgacatattcgaagctgtggtttaataggaatttgagaaaggtgtaagaaataggataaaaagaaggtcagcaccatgtaccaggaatagctttactttccatacatagaaatataaatttagtggtatcctatattactttagtgtcgtacgctttgtaagacttaaatattttattctattgattccactactttggtatgttaagacatttctttaaagatgaccaacaatatccttattttaggtgccactagcagatgtaagcgtatacttagttgccgttagatgtgacagaatgagataatttatgtaaagcagtagagtacctggcacaaagcaaacaataaatattattgttattgttgttataattgtaaaatgaatgacttcaaaaacatagtcccagtttggagggattttgtgatgcagaatatctaagtcatagaaatagaagacaggtggaataagtatatgttcagagtttttagatgtgttgagtagagacggtaataatggaagcattaaatacaaatgaaaatcacaccagatatccctgaaattcaagcaaagaaagttcatcatgtattcttgggcagcaagagaaaggactagggttatggcaatgtgtggaaaagttgaggcttgctaagggttgagatctgttggtagccctggatcacatggggtcagcaccaggcagtgcctctgaaagcggagagaggtcctggacttcccttgtgtataacagttcctagtgtccaacaatgaggaaacggtgaagcatggttacaaaactgtgacaaaaatatttacatctagcactgttaccactcacatgccaaacattggctgcacacgtgcagccttatttgtaattaacatcaaaagactagatctgaagccttccataaatgagaggccattcatatggcattcctggaacaaaacactgcacaggtaccagcctctccactcctgaccgggttggtgctgaacagtcagggattgttcttgaactagacttctgatgcttcttgcaatcttctttcatctttccctgaaatacacaaaataaacaaatacaataacaaatagtaattaaatgactttcaggataacatctagttgttcagacttcacccttcacaggtgtgtgtgtatgtgtgtttatgtctgtatattgaagcaatttgaatttatttactgtatattttctgagtaaaagactgaaatgaactacttggttcagatcatggtgtccattggtgacattgtttggaggcataatattctttatatggaaaatcctttaattccacagttagttacctcagattcagaatatgaatactgtttataatacgcttttgtaggaatgaatttgaaaggtagtttgtcagtaaacgaaagcacaacaactaatctcaaatctgttttgatggtgtgataggaaagaaagtaaaacctatgtgatggaccctgtaattggggcaggaatctcccaaagaaaaaggggagaattaatgacaaatgtcatagatcttgaaatttaatttagggtgcattttgtttatgaaacaatttaataaggcaacaaagtgaaatgatttttcatgtagcttatacacatgtaagtgcctctgattcatggtaactaacgtacctgatggtgtgtaaagtaatactgttgtcagaaggtttgccaattaagataatttgagtttactctttttttgttggttagtttagctgaaggcttgtcaattttattgatttttttcaaggagccaaagtggattttggggttttctctattgtgtttgtattctctatgtcatcaaactctgctcaaatcttacaaaatagtaagattagtaagaaagcagactaacttctgcttgctttgtatttagtttgtgtcttttccagtattttaaggtggaaggttaggttattgatttgaattcttttttgaataaaggcattaacagttataaattttcctctgagcattgctttagctgcatccaataagttttggtatgccatgtttttgttttcattcatctcaaggtattagaaaatactttgccttttaatttctttttgatgcaatggttatttagcagtacattgtttaatttccacatatttatgaattcccaaatttgttattgatttataatttttttctgttgtgatcagaaaacatactttatatgatctcagtcttaaatttatcgaggtttgctttctggcttagcatatggtttatcctgcagaataatccatgtgtacttaagagtatgtattgtactgttgttggatgctgtgttctatagatagatggctgttaggtctatagtgttggcctgttgtgttgttcaagtcttctatttccttgttgatatgcctatttctgtctattatgaaagtagtgtattgaattctctgactgttgttgaataatctcttccttcaattctgtcagtttttttctacattcattttgggacttttgtccttctttatctctagtaacatttttttattttaatatatactttgtcagatattaatatagctgccccagctttcttatagttgctatttgtatgatgtatcttttttcatcttttcactttcaacttatttatatttttgaatctaaagtgtgtctccaacttatagttggatcttgtttttttttgaaatccagtctgacagtctctctgccttttggttggattatttaacccatttgcacttaatgttattgtttatatagttggatttgtgtctgccattttactttttgttttccacatgtcttgtatctttttgttgttgttcctttattcctcctctattactttttttttaattaggtgaatattttctagtatatttcaattgctttaattatttttttcatttttttgagtatattttcacagtggttgctaaagggcatatcatatacttgttaatttatcagaatctatttcagatttataataactttattacagtgagttatttagttactactaaatagctctgaactctcttctccctttttgtgctattattgttatacatattacatctatacatgctgtaagcccaacaatacattgttatatttttcctgtaattgtatgtatattaagcaagcagagacttgagaacaaattatatttatagagtttcttctagtaagcttttaatttaccatttctggttatgttcattttgtcttgtaaatttgagtcaccrtctggtgtgatttcttactccagtactactttgttcttatttacctcctttgtgttgtcattgtcaaatatgtcacatttgtatatgttctgggtctaaagcataattacatgatattttatacaattgctctttaagagaaggaagaaatgcatttatactgtctttcataattacataattacatttaccagtgcccttttttttttggaatggattcaaattagtatctggggtcacttcattccaggcagaagtcctttttttaatatatttttatataaggcaaatctgatagggacaaatctttagtttttgtttatatgggctatctttattttaccttctttgagatagttttgctaaatataaaactcctggtgaaaagtttctgtttctgtttttgttttctcagcatctgctgagatgccagctataaagcttaatgaggtttccttctacaagacaaatcgtttttctgtttctgctttcaaaaacaaatggtttcccccctgccccagatttcgtactatgatgtatctgggtgtgagtctgtatttattctgcttggaatttgttgagcttcttgggtatgtagatgaatgattttttttaagaaaaatattaaatttgggatgtttgagccattatttccttgactattcatttccacttctttttctctctccttttcttctggtactcccattatgcatgtattaatgcacttaatagagtctcatatttctctgatcttctgttcatttttgccccatcttacaccacccctctggggcttttgttgtttttgattgtttatttgttcagtgacttggctgtactattttattttatttatttatttatttatttatttatttatttatwcatttttgagatggagtctcactttgttgcccaggctggagtgcagtggcaggatctcagctcactgcaacctcctctacctgggttttctcctgcctcagcctcccaagtagctggcattacaggtgcctgccatcgcgcccagctaatatttttgtatttttagtagagacatggtttcaccatgttggccagactggtcttgaactcctgacctcgtgatccacccacctcggcctcccaaagtgctgggattgcaggcgtgagccaccgcacccagcggctgtactattttaattaagtctgttactcttgtagtgtgaaccctataatgtggtttctcagagagcactgccctgggcatgtacacagtcactctgggatgacagtaagttagtagggctctctctgtgtctttccttgatttctctgcctagctctttgcttccattggtattacaactacctgttaggttccactaattgctagctaattattctattgtttttggcaatgccgtggggcataaattgctccacatctgattcaattatatttgggcccttttgcaggattagagatagaacttctgctctgttagtggggattgggtaaaggaaaagggctcatgacctctgggtcacagccccaagagatttagcctcttgcaacccattagtatcccttggctgggagctgagggaagagggagacccatcttcttgatcatatttcccaaagagtggagttttaatcatactaagctggggtagaagaagggaggcagcgaatttgtggctcaaatttcaaatcaaatactctcacttttcctactgagatttagtagattttcttgagtaaatgtttctccatttgctatatacccttaggacagttttcagacacctatttatttatttactttaattgccacagttttcttcactggggagcaagtctgtggagatcctcacacagctatcctggatgtagttttctgtcatttaagatagtacgttactcaaaatgtcaggctatcagtccttttttggaattttctcaagtaagcatatttctcaaaattttgtatcatattataattaagggtgggctcatgctttttgatagcttaaagtttaaaagggaatgtttcttaatatgaaaatgaagttgacataacctaatattagtcattaacttattgagttaattactctgaaattttatttctatattttaactaaagaattaattagagtgctccaattaatgatttttaagtcttcacaaacaactccaacatggcacagttataaaatagacatctagaaaaacctcattttccttagaatgctgtccacttgtttctattaaaacatatgaatatagcaaatattgattgatgaaaagcaggctattaaatatagtttataatcttgggtcgtaaagaattatgaagaagatgaggcattatccaccaatgatgtaatgcagctctaaggatatgtacaagga

SEQ ID NO: 94050 - DNA, 140556 bp, Homo sapiens
atagggcagagaaagcaatcagatatgcatttgtctcaggtgagcctcagagggattactttgagttctgtctgtctttcgtccacaaggaatttccttgggcaaattgtgagggaggtatgtagcttcttatatttgtagctatctcttccaggaataaaacgggaagcaggtttgtctaacatagttcccggcttgacttttcccttggcttagtcattttttcccttggcttaatgatttatattccacaggttcaacaaagtatggacagccatgtagaaatatgattggacaaaaagggcatgacatactgctaacagactgagtggggaaacccagcaaagctgtctgtctagattcttcttggcctctctgtgtaggattccttccttatgggtatgagtcaggtctctctctggaatgggggtattataacccacagtcaaacaagataggtcagacaatttcttcatggccatattcgcatatcttttggttcttacctttcacacagaaaggcagagggaaggttagagaaatatgtttaggttttacggctggctttagggaaaagatcttctggtttctattatccaccttggggaagaaggattctagtttctatggtagcatcagggggataatgggcgtgaaagacaggcaggagaaggtcagagaaaaactttcgcttttgaggctgcttctgaggacttcctttttggggtgttgttatctgaatctcaacagtggaaaaaataataattaatcaagagtttagactttgcaattaggacagattcaggactgaatctcaattactttagttatataaatttgagaagacttcttaaatgctctgagcctcatgttcctcatgcaatgatagtgataataacaccaacacttgtcctttctcaaacatcacatcctacctagaatttaattatctcaatttaaggcttaatacctgtaaaattcataaacccctgggtgaggtaacattttaaggtgattttggcaacttaacaggtttgataggtttgattgacattttgatgggctagagagagggaagtcctgaagattccaaacggacaaggaagctttggggagaggcaaataagcagaaaagatgaagttacagcaattcaacttctctctctctcctcctctgtaaaatggaaattacattaatagcaatgacattaatatctgtgaggattaaatgaagaatatgtggctcttaataaatattagctgttttgttgttgctcttgaagatgctcagaagacaaatatgactttgttcccaatttgtttttaggattgtatgtacagacaacatatggatttgccagagaagaaaagcaatgcttttagacttatttcctgccttaagtttttaaagtggaataaagagcagtgggtcacataagagctcattatatgggtctttcatcatagctttagatcctgacacgctaagcagagattatgttgcatctgtgatattaaaatacatctgggtatctattactttttggcccttttctatacaaagcacagaagctgagaatcatgtctcttcagatcaagattgaacatactctctctttcactgagggaggtatagggttcagggcttaatcttacactttgcttatcctataacagaaataataatacctattattatttataataggtatgtgaagatcctgggagtccagggtagatggccattctgttaacctgaatatgcttttaatgtgcagcattaatctaagaaaagtgaaaaaatggtgagattttacttcaaaaaatccaaattatatgcaacttaagtcatcttcagtagagtttcagaaatgataggggagatacaatttgaagtgaactttgaagacaagacaaggtgatttgcaatgaaggatatttctagggtaaaagggactttgaatagaaggaacgaataaagaaaactgaaggagaacttgattctattgcaacaagaaacatatggctaattccaactatctggagcataccaactttaaagcagactgtcaaaactgaccctacttaactcattttaaagcatggggttcttccctcaaccaaaaacacagatgccaggttacactttataactggactctccactttcattaaaggtcattataaggaattgccacctaaaatgtgatgtaaatattttttgagaaacctagtatatcacttgcaattccctctataaagtacctgcaataaatgcatttttaatattagatttcagtaatattttcttcacttgtgacatactacttattttgttttatcactatgataatgggagaatggaacacttctctttgttttttgttcttatttccttaaagttttagagtaatagtcacatactaacctataagaaatttagaaaggttcaattaggccttctatgacaaaaatatctaagtctctagttactaaaatgttaatgtttatgttgtatcatggtctatactgcagagtcagggtaaagacacatagctgtattttttagatcaataatttgttcagttatttacaatcaagagtgttaagagaacttggattgcagacaaatctcttatacatttatccaattatattcaatgttttttcagaagggtaccttaggactggcctggtacatacttgcatatcttttgcttcttaataaacactagccactattttcttttcagtacattttttttccttcttgggcaggataaagagaagttgattattctgataattgcctgtggagaagtttctttggatacaattttattaagggcattgagtctctgagtttaacttttttcttcccaatgaccacactgtgcacaacgatgatgttgtggattttgaacctgaatttataccagttcagacatctttggcttcttcatgctggcacaggcttgcctggctgagaatctgaagatgcaataatttttaaaatgtattactgtcattattataattagtttacttattgttcccccagatattttttcaacaatgttctgctaaatctagagtggctgcttgctaatagaactttagctttttcacaaagcttccaatgtgggaatctaatccattgtcaaaagtagtggccaaaatgtccctactcattgtggctgtgatacaggtgtattgtaaaaagatgtgattcacacaccattggggatctctaagcacacctccatgttatttagaatttttattttggcccaaatatctacaaggtagtggggagttatgtgagtttcttaggccatgacaacttgccagctttaataccttcagatgaggatgggttaccagccagcttgggcccattttgtagtacccatccaggacagacatactggtcaggggcagaaatataacaattcagtgggaaagctgatatggttggctgaggtgatacatttcatgcatttgtgtgaatacttcctcctgaagatttgatgattctggaatggtttggagacgacttcaaaaataacatgtttagtaaaagggaactgtaggacactgaagaaccactgctcaagacccaacatagtcagctactggtgataaccatttcagtactttgttggctaggacctagaagttgggaagacatttatgagagattatcaaaaagggagaagctgttggaatccttatactgtttcataatcagaattgttgtaaggtgacctagttcttgataattatctttagaaaagcaagggtacaggttaacagagggggatttataggataagaacagaagggcagggcaaaatctatgttcacaaatagaccgactctccttgtcttgttgacatagtaatcaaaaagggagaccactgaaaatttttgcgtattcaaaattattgaaaattttgtcttccttttattttagggcttgttaagaaaaaacatgacccaaaatttggaaataaggcaaaaatattactgcctaccttttcaaagatactgcactaaagaaagcactgtcccacaggactgcccaagggttatccaagtctgggtagcaaggggtcgtctgattcaggcactaccctgagcggaaaacaatggcccaagacctcgaccaaacccagctctccacctgtttttgtacagctttgaactgagaatgcttttttacaatcttaagtggttgagaaaatatcaaaagtagaataatattttgtcacatgtaagtttacatgaaattcaaactttagaagaatttcctcttcacagacatcacatcttcaagagcaaatgcttgagccctaacctgcaagttatagtagaaaagtccagaagtccagcctggtcctcgccaagtttccaactcctatgcctaggggtattttatgcttacaggatctaacttggttacaacgtctaacttttagcagagaggcagtgctgagtagaaactggacttgttaaccatatcaagtcacttaagttggctaggatcccctacttaggtagcggccataaagcctagggcatccctgtgccctcaatggttcacttctgagtggtgggcttcctgctcctcaatagagcaatcggcagaaaggcccctagaaagctacattgtcttcatccgcgaaggattccctgtctcctattcctcaaaggagcacccggattctactttcattcttcttttgccattgcattttataacttaaaagaaatagatgattgtaacagaagaaagaaaactttacattgtgagaaaatttagacctaaagcttatagtaatgtgaggacgaaagtctatactgtttaagtaaataggttctatgagcagcatccaggctaacatcacacagtggtattttgaattaaattgtacttgtgttttgtttccgtgttttgctgctgtaaggaaagaggaaagcatcccctttctcggccctcctcccacgtccaggctaatttgcagcatttctacatctcagagtccacccttaagatccttgccacccattattttgtttcagaacgcttaatccatcaaggaaggttaaattggattaccccagtagggaagggacgggggctgtaagcatgagggattatccctgtaaagggctcgtggtgtgtgtgtgtgtgcgtcctgctagtgttgaatgacggagacctgagtttggattctgaatccaggtgtattcgatgccgctccggcgtagaacgggttaaagatgcccccagccaggtagagccagactgggagttgtgcaaggtctcaaccccctaaaagcggcccctcaaattgaagatgagtaaatcatagttcgtaaatcagaaagattatccagtactacgttactctgtttatttccctttcgtcatccctgagtcttgggtcaagtccatcccagctctgtcctccaggaatcaagggaaatacgcaaacccgcggtgggttcgcagccgcaggaaggacaaatcttgcccccgccgcggcggccgccccgcgttagctgcctaagagaatctccgtggccggccagtacccgccttggtgaggattctccctcccgcgagaacttctggaatgccgccgggccagattttgcagctgaggcctccgacgccactaatattgggccaagcagggagtgctgctcttccttataaggttttagcgaaagttaagtaagccaattaaagtgcaaaacacacagtctggaacaatacagcgctctataaatggtctccattattatcattatccgttagttataactggggataaaaaaaaaaaaaaaacgacaaaaacctggagaaccggaaaggtctgcaaaaggggcggaacgcgggaacttcgatttggggaaggggtggcgggggagatcccacacaagcagccaatccagctgtcccggggaggaagaggaggagtcaaggcccgcccctggtctccgcactgctcactcccgcgcagtgaggttggcacagccaccgctctgtggctcgcttggttcccttagtcccgagcgctcgcccactgcagattcctttcccgtgcagacatggcctctggcaccaccaccaccgccgtgaaggtgagatgagccctcccagccgcagcggttcgccctgccggatgccttctcgcccccgcgccgggggaccgcgcctccgggggccatgcgcccggcccgtgcgtcccttgccgccgcggggagggactggggcgcggcactsgggactcacttgccgcgcgaggagagggtacgcttgcaaatgatccccctgccgcaccgccaacacacacacacacacacacacacacacacacacacacacacacacacacaccaccttttggcttatctgcacccgcaccctgtagggcgtaggcacccctttagagagagaggtcgtggatgggagaggctgcacccatgccaccaccattcctgagaaccactcttcttccaagaaagacacccggctggagtcagsaggtgtccgggcgcctgcagcttctgtgaccgtctcctggtgccttgcgggactccagcttccgctctctgactctgcttgttgcctgcggcccacgtgggagaactgcttacttgctcttttgtatgcttccggcttctttttcctccaaacgtaggccttctccgcgctgaagttttccccagcagcgtaatactgtaagaattctgagactttcttcgaaaaggagtacaggcgtccgtttttagggctgcactgtttggaggcctctggcttgaaactgctttgttttgcagccttgcaagttagagttcaatttccttgtgccctaggccctgagaggccttgatacaaggggtcattgtgcggtgggaagctttgtgctgaggagggcacgagttctgagagtagcagctggcttccctggggttttaaacacttctctcctggttagtattccgagagagaattacagcacgtaaagaaaaattgatgataaaacttaagacctcttctaggcagtttattactggctaagaatgcgttcthgtttgatttttagaaatttttggcctatgggataggaaggtctgcgatcttctccaaagcatctcgattccctacactcgactgcagttttcccgggagaaggcgaatttctgcggtcagtgtgtaatcagccagattagtttattamgcccttgcaggtttaaatgagccacttagaatgagaggaatggtgaagggtgttgcatccagacttatatatgaaacttattttgtcattttgaaaagaatcttgcatccagcaaatatttatagaaggcctctcccctgccttcattgtttggcggaaacaaggcagaaatggttttcatgaaactcgtgtgaagtatgtgacttctcttaggtgctcatctataaactgagaattttactgcagaatttgctaggagggctagaattatattgtctatgttgcacatggtagaagcttattaagtggtagtgcttataagtgggggaactgagattaattttgaatgatcttttccccaaaaattattaagttattgtgttaggtatcattaggccacaacttttcaccttatccttgcaggaatacacttcaagcgccattaaaaatggagaaatggtgtttaaaacagtcttactttaatctggttagcattctccctgccacagggtttcccttcaaattaatgcagtgcatttaagtgcagaatgggcaatgggattctcagagacctgatgtaaatattgaatagtgtgtatttttggtcttggcaagcttctggatataaaattaagaggtacatatggtgctaggactgcctgctgatttctcttttaatttagaacagatgacagctttgccgtagagattccatgatgccagcaccgtattccccrgacttctaaggcaacattctgtatagaagatgtgaggtgccagtgtccagagcaaaataggttaataaaaaccacrtcctattcccaaattatagaatgatggggctggagtgttccttcaagaccatccatatagccacacaaacccgttttgcgggtgtaaagttgaggcccagaaaggtcagctaagtatccagaattacacagctggacctagataatgacagaattgggcctagagcctggcattccaccaactagatgtgaggcatttctgaaatctgaagtgtggtctctgccctgttttcttgtgacctaatgcacaattaaaatgagcacttgatagaatgtccatcttgaagagggaggcagagggtatgcagaaagcaggctgcctccagtgcccactgcacaccacccaggtataggtataggaggcacatgtgtgtctgaaccccattggtgtcactggcaggtcctttgagaggttgctggatttaaatacagtaacatgtaacacactcagcccagttccaggtactcctttaatgtcagcccaagtacctctcttcttaaaatagagatattaacggggtggatcttaaattcattctcaattttagaggtgcagttaactcatgcaagtgaaagattccactgagttttggattggcagtatatttggcatatctttcaaatctagccatctactggtggaatcctattcaaaaatatttattgaatacctgctagacaatggggatgcagctttgagtaagcgaggcctttatttattttcttcaagtttatattctagtcagggtgggaaaccaactgacatgaaagtgaaacagcagtaagattccattgggtgaggggtgtcagaaaagactcctagggaggtggattttaagctgtgcagtagtctgcctccaaaatctgtatgttgaaacctaatcgccaatgtgatggtattagaagatggggcctttgggcgtgattggggtcataaaggtggagccctcatgaatggaagcagtgcccttacaaaagaggccccagagagctgccttattccctctactaagtgagaggacaccatctatgagccaaaacgtgggccttcctcagacactgaatctgctgtgaccttgaacttgctaagcctccagactatgagaaatttctgctgtttataagccacccagtcctaagatattttgttatagcagcctgaatggacttaagctgatagtgaaaatagggataaagggtaaagatccaagtgaagacctgaggagagagatgggggtaggagagcgaaaaccaagatgtcgcagaagtgagctcagtgtggtaggaatggaaatcacggatgcacagtgagaattgggtggatgcagctcataaggccatccttgtagaccgcgatcaagaattttgattttaaatgttttggaaactgttgaagggttaagagtgggaggcagcatttgatttacattttaaaatgattactctggctgttgtatacagaatagcctgtgggcaggggaagagctaagagatcaggccagaagtcttggtgctggggctgaagtctagggtgggagccatggaggtggtgaggaataatcagattggggatagaatttgcaggtagaacacagagatggataagatgtggggagtgcaggaagaagaacaggatgatttctgcttttgacctggaaaaccaaaaagatgatgatactggtggatcatttcaaagtgggcgataaggggccacgagtgactccttggagccaaggagggtgagtgtaggattccttcctcccagatactgctggttagggggccagaggctgggatgctgaggggcctctttgctgtaggagcagagtgggtggcaggttgagggagggaggaagccacctggagtgagartaattcaagcaatcttttttgtggttcactgcagtgagagatggtccaggcagggagtgaggatattacctggggggtagccatggagagaggcagcaggagccagaggctatgggattaacactgccattgtctgagaggacctcagggagacattgtcctccagcatcagccaagggcaggtggtattcctgacagagggccaaaccagtctttggcacccagatacagggcattctggagggctcctgcagtgtaccatggctcccctgggcagcctcccagctttcattctgggagattaaaaataagacttggccaggcgcggtggctcatgcctgtaatcccaacactttgggaggcccagctgggcagattacctgagctcagaagttcaagaccagmctgggcaacatggtgaaaccccatttctacaaaaaatacaaaaattagccaggcacggtgctgcacgcatgtaatcccagctactcaggaggccaaggtgggcgaatctcttgagcccaggaggcagaggttgcagtgagcagagactgcgccattgcactccagcctgggcgacagagtaagatcctgtctcaaaataataataataataacaacaacttgttaatcatggttgctgtgacaaggaggggatatggtcccattgtaggttggtagtgagctatcaacataatgatattaagggagatggacaagtcatggtttgtagactgtggaatatgggcctttacactccctgctttgctgtcttgagtgtggcctgcaagggccttcagcctgagagtccttgtgtggctatctgaaactgaggacaacctgcaggccccagttgaaaatcacatgaccaacaagccttcattttttttgcctagggacacaagggcattttgggcaggacaattatttcttttgtaggactgtcccaagcattgcaggacatggagtacaacccttaacctcctccacagaaatgccagtagcactccccctagtcatgacagccagaaatagccctgtttccagatacccccaggagagctgtttgacatttagttgaggaccccaaggctaaatcccaaaaaagactacctgctgaagagaggtaggagcagccaggttttgtactgctcagcagagtaaaaggaggaaataagggctttttttgttgctttgaggaagtttattttgattttttatttttgccaggagtggtagggtatacagaaacagagactgatggtaatacattatttcattttattctcttgataattttatggattagtaaaaatcttaccctataggtacagctgaggaagcagttaaggaaaatgtttgtatgcagtggattctggatcctcacctgtggttgtagtcatggcattccagcctgtgcctcaaaagcatctaaagcagtggttctcaaagcgtgtcatgcattcatatcacctggtcatttgctagaaatgcaagttcataggccccaccccagtcccagtgaatcagaaactctggggctggggcccagcaatctaggttttgacaagccttagaatattcagatgtccaccgaagtttgacagccactgacctagagagctttggaaagggtggccatctacatttttaacaagttcttcccttagtgttatagtttcctgttgctgctataacarttttcacaaatggagtggcttaagacaacacacatgaggccgggcatggtggctcatgcctgtaatcatagcactttgggaggctgaggtggatagactgcttgagctcaggcgttcaagaccagcctgggcagcatggtgaaasctcatctctgcaaaaaaaaaaacaaaaaaattagccaggcgtggcggtgcacgcttgtagttcagctccttgggggctgaggtaggagggtcacttgaacccaggaggttgaggctgcagtgagctgagatttcaccactgcactccagcagcctgggtgacaaagtgagactctgtttccaaaaaaaaaaaaaaacacacacacacacacaaacgtattctcttacagttctggagtccacaaatccaaaatgagtcttacagggctaaaattaacatgtgtatcgggctggttcctcttagaaaaaccatttccttgcctttttcagtcttctgaacckgtagaaccatgagctaaataagcctcttttctttataaattaccctatctcaggtattctgttatagcagcagaaaacagactaagaaaaatgttgtgcttgtaagagattgggacacggacacatacagagggaagaccatgtgaagacacatggagaaygctgccatctacaagccaaggagactgaccttagaagaaatcaatcccaatctcaccttaatgttggacttctagcctccagaactgtgagaagataagtttctcttgcttatggggaaaacctatttccttgcctttttcagcttctggaggcaccagcactwcttggcccatggccccacatcatgtccccttttctctccctctgcttctatcattatatcactttcttcctcatttgaccttcttgcctccttgtgatttcatttaggtcccacccaggtaatctaggataatctccccatctcaagatcctggatttaatcatatttgaggtaacattcccaggttctgggaattaggatgtagctaggatctcttgggacaggggcattgttcagcttgccacactcagcccatgttttaaaaatttatggtctaggggccgggcgcggtggctcatgcctgtaatcccagcactttgggaggctgaggcgggcggatcacaagatccgaagattgagaccatcctggctaacatggtgaaaccccgtctctactaaaaatacaaaaaattagccgggcacggtggcagcctcctgtcatcccagctacttgggagactaaggcaggagaatggtgtgaaactgggaggcggagcttgcagtgagccgagatcgcaccactgcactccagcctgggcgacagagtgagactccgtctcaaaaaaaaaaaaaagaaagaaatttatggtctaggccctagagcaggttgcttagttctgagggcactttagaaccacctgcggagctttaaaaacaaactacgccttgcccaactaatcagaatccctgaggcctgggctttggtattgaaagctagagaaggggaatgtcctagtatccagcagctggttcaggagggtgggtggctcccactgttgctccacaggcaaaggagagctctaacaaagtatgcattagggagagtcctcctctaaaaatatctggccatttcagcaggtgaagtgtgtctttaagagggtgtctgccctttagactgatatctgtacttctcaaggggcatttgctcaaataaaaaccatggatgttttgagcgcttgcatcatccaagcttctctgactaaaatatagagtcactgtattagttcgctaggcctgctataacaaagcactacagaatgggtagcttatgcaacagaagcattatctcctcacagcgctggaggttagaagtccaagatcaaggtgagatcaaggtggatttcttgtaaggtcagtctgcttggcttgtacatggcaatgttctccatttgtcttcacagggtcttccctctgtatgtggttatatcccaatctcttgtaaggacaacagttttcttagtctgttttctgttgctataacagaatacctgagacagggtaatttataaagagaagaggtttatttaaaagaaatgaaagggagacgagggagataggaaaaggaaacaaaaaagagacaaactttgcttcataacaacccactctcactggaactaatccaacccaatgagagcaagaacaccctcccctgggactgcatgaatcccttaatkggggtggattattaccatggctcatgactcaaactcctcttaaaggtactacctcccagcatcactatatttggggaccaagcctcaacatgagttttgaagatgaccacattcaaaccataacatgaggtatactgcattagggcccatcccagtgacctcatttgatctgaattacctctttaaaaacggcaaatacagtcacattctgaggtactgagagttggaacttcaacctatgaacttaggggagatacaattccatccataaccattacctacaagggtggcctacagagggggtgtcttgtcagagatggagaccccagctatccctgtggaccctattgcaggtttttaacagtcctcacagcctgagacagttggttgctccctctcatacagctaggcttccaggattttgcaaggccctgacaggcctcaaagccatgtcagcctaataatgagggcctccgtctgctgtgcttgccaaaaytgttatggcaaccagagctaaaggactgcagtgctcagatcgggctgtgccagctccagctctggctcgcttaccttatcgtgagcttgaggcactcagaggcagcccatctccctggcatgagctrgtctcaaccgcttggggtgatggtattttgaaaatgccattatagagtgctgggttccttacggcagtgtgcccaggcctcaaagtgatggtgaatggtttctgggacaaagaagggttggtaaaatctcctgtagccaggtactagaagaaatagacagagtaggggttactatgcaccctttccacattgctagaagtaactgttctgaccaggtgaactggtatttggataaatgctttcacagtctcagagaagtcagacccttggattgatttgctcttgaacaaaaaaattttttttttcactgtgaaaatgctttctttggggtgtctttagaacatgtgatgtcaagacacaacagcaagcgcacatacactaagacatggctgtcatagaacagattgtgcgtgaataaagggttcacaccacttccaccctttacacagtaacagaaggctctaggccacctacctcctccttggctcactcaaactcttcctcctcagccgtggcctcctgctactgctggtactcagacaccaggtcgttcatgttgctttcagcctcggtgaattccatctcatccatgccctcgcccgtgtaccagtacaggaaagctttgcaccgaagtatacctgtgaactgctctgagatgcccttgatcagatcctagatagcagtgttgttgccagtgaaggtggccggacatctttagccctgagggtgggaagtcacacacagctgtttttatatcttgggggatccaaccaacaaagtagctgctgttcatattttgggcattaagcatgtgcatgtccacctccttcatggacatgtggcccctgaacatggcagctaccattacgtagcaaccatggcagaggttgcaggcagccatcatattcttggcatcaaagaactgccaagtgggctcacgcaccatgagggcccagtactgctggttgtcccagctggtcagcagggggaagccatacatgaagtgcaggtgggggaacaggaccatgtttgcggccagcttctgcaagtcagcattgagttggccagggaaatgcagacagatggtgaccccactcatggctgcagacaccaggtggttcaagtcactgtaggtaggtgtgggcagctttagggttctgargcagatgtcatagagagctttatttattatcattgcagaaggtctagttttgagaagtttggtttgatggtcagtccgtggaaaagtgtggcatgagccactagcttttaaaatctgtcaaggaccttgattgactccctatttcagaactctatcttgtgtaataaagaagtcctggctgggcagaaattccatctcaggtcttgaacacatttcctacacagtctagaattaactggactgaggactgacgcttcctgcccaggaggcctggcaaggtcttgtcattgtttcctgagggtggatgaggtcattaagaaagagttttcctcccctctgagatgattcactcagatacctggagtcactgtttctgtgcttgttctgtgaccttcgtcatgaayttgacctctctgagcatgttgtctcataacatggagacaaataacttttctaataaggtataatgttatggaggactccaggggatattgggagagggcacatcatagtggttaagcctgaaagacctagatttgtatcccagctttgctccttatgattggcccctggacgaggtttttaatttttgtgcttctctttcttcgtttgtaaaacgggtaacattctatagggcccatcttatggtcctgatgatgaaataaggtaaggccactgaagcacttagcacagtgcctttaacatgtaagtccacagacacagttactttataactaaggcagtactgagttgacacaaacttagagactcaaaggaatgtggatagaattgggccatcagtgcttgggtacttcatcccagttgtactttgctgtggagccagcaggtggcgacattggccacatcttggccctgctggcctccatcttagaggtccagtttcctgggatggcgggactcagttgctacacttgtccctgtatccctcgcacaatgtaggtttccgtaaacaactggacctagtaaagtgactggatgggcttgcctgcagatcattccagagcagtagccactcttgctttcatgtccagggctactacatgttccttgctgagggctgagttgccagctacctggtgcagagtcattatgcagccaggtggtgcagactgaagcttggggttgctgagagtgagctcaggggctctgaaattcagcgggacacctggttagcatttctcaacaactgctacaatgctgggcaagttcacctaaactcagagggtggctccaaacaaagcccaactcgatttgtgtatttgatcccgagcatccagtgttgaatccagaatctgagatgccctggctcagggaacacccagaaacagccaggccaaagtggtgataagttaaaaagctagtagctgaatccccagggagctggctgagagtaatttcagagtcagcagttcatatctgtgtcccagrtgagkatatgggctggatggtttcttagcctcctcatgacctgtggtgcttcagaggtccacggaatgaaggataagatggagaagccaggctaaggaaggattgggatttcctaaaacagtatgaatttttgttattttctattgaagtgccgtaatttaaatgtattgacttaagtgaacacttctgttgatttgaaagctataatactggttactctttgttcgttgacataaaagtatgttaacctgctgtggttttaataatatacctccacaagatggcgccaacatcaaagcctggctttgccacttaaggaaattgtggtggacagtcacaaattatgtaaccatgtcatgggaaacaggcagagttcttcagtaaaaacctcactaaattgtccttattttcttgtttgttttttgttgttgttgctttttttgtgtgtgtgttttgtttttttcaggaaactgagccagaaaggtaaccatttttttacgtgttgataggactcaacttgtgtaacctgacctgaaaattatttaatgcagatgttcactgaattcttaatcctggaatttttttcttgaggcctactttattttatttagttacccttgtgacaatagatttaaagcttttcattgaaaaacaacaatgctcaggtcacttcgcattaattaggtttctaataaagttagcctggcactgtttactctctaggaggtaccagcccaaggaaatttccctaatgatttgttacttatttttagttttaacagtttagttaatttttatttatttttgtaattgttcttgtttgtctttcttaatcatcaaattagatcaactctcagaggatagtgctaggtttctttaactcagacaaggactttcaagataatctctgaaaaatgcaatacaatgcatgaacttaaaaaaaacttataactaccttttgaattatttatatttgcataaatgtatttactgagtaatatacatgagtatgctatatgtatatttacaacatgtaaatatgaatttgcatacatatatgaatgattgttttcataaatgtatatgcgggtaacttttcatgcaatttcagtctcctctgtctgcattctctcctagctctgtgattctaatggcgtgggaaagataatctctcatttctttatcaaatagaacagtgaggagaaatcaataccaaatggaatacctaatattttatatcccagcagtcttctgaacattgtttattctatagtccatttgacagagaaacaaaattgatcagaaggtactttccactaccatacttgcctacttttaggtttgattttctaccttgagttggttaaaatacctctctatgctgacttgtaattcagacaktcagaagtaaatgtgatgtagtccaaaaaggtgccctacgttttggttacttatagaatatagaaggccttcaaatgtttgttgatttttatggaaggctttgaaatatttgttgattgakgttcagtaatyttcagatttcaaaaaaataactagggcttggcaggaatggagaagagcatatgaataaatgaatttgcttagaatcttatttctaataaaaattaccaaatacaataatcttctctgtctttttctctcttagattggaataattggtggaacaggcctggatgatccagaaattttagaaggaagaactgaaaaatatgtggatactccatttggcaaggttaatatccaacttgtggagacatgttttttagttttttcatttctccttgctggcttgatttttgaattaaaaaaaaaaaaaaaaagaattgcttttgttttggcagcccagggctgtctgctcccagcagagagggccagaagttctgctgttgggttccatcagctgagaaggtgtctgatgggcgcctcacactttgatgttttgagaaaatggctacttagtatgtaaatcacttctcattctgttgctggaaatcagatactcatttcagaccayagactcatttcagactgtacttttcaaatctacattcaaatcttctaatttgtggccaataggtcacaccacactaattaggggacaggctgatgactaataggatgaattattgttacgaagcggcatttgagtggaaakaattgttttggggaattagaacatacctgatgttagttgaatgtgtaactgagctagaaataaaatgctcctccttttataggagaggttgcttgttctccaagcccatgtcactcagcctaggccggggtgagggtgtctgcattctcctaattccatattgctacgtcctctggtccatctgtaagatctctctatctggctgtcccaaccaaaccctccttttcagctaaattcttaggttgaccttgtgtgctcccagtcctgcagtcatcctggttcattttcttaaacccctcggttctaagggtctttccagcctttgttacctcaagtcatttccatgatcatcttagacctggttaacacaagcagacatttccagtgctgaattcttagtgtcatgatggtggcttgttatcctttctgcctttcaccttcacacctgttctcaaacctgcccaataaccttgacacatctaaatttgaccagtctaccatcagagttccctggggtactcgttacaaatagatctgactaaatggtacctacacaggtgcccatggtaaccttgagtcctgtgaatctatgcctgcagagggatcaataagtaattgattaaatgattatattgataatcagatcttgcctcttctctaagttgtatcctcagactcttcagattccatgagtcctgttgtggttgaacaattataatttacatacctgtttttaaatcactgagttaaatgtcattttttcattgcatgcagccatctgatgccttaattttggggaagataaaaaatgttgattgcgtcctccttgcaaggtatggtattttaagctttttggatgttactactaaaggataatttaaatttaacttaaattctggaaagagtaaagatacaggtctgagcttttatatgttggcagaatcagaacatcttagtaacctttatttacaatgttttatttttggttaagttatattgacttaggagatcaaagatctcatgctcttgccccttacattgggaaagtagatcagatgactaaaatcaaagctctggttttagttctaactgcaagaagaaatgttttgttcatttttttcccccttcttataaagataaagaaaaacaatgcatcattaatgacctcttgctggtagtagttatatgtctgtgggaagtaggcttagggcttctgaagtgggttacttgtgtctgtgctgttgtttccttaaggaggctggtgctgctccatattacagaggaggccaagtcatttttatcccattgttagaagttagtcaagatatatgtatgagttctctactgttgtgtaacaaattaccacaaatttagcagcttaaaatagcacacatcatctcctagttcctgttggtcagaagtctggcacagcttagccagtcctctgcttggggttgcacaaggccccacaaggcatattcaaggactgagtccccatctggagcttgaggtccttgttcaagctcgtgtagttgtaggagaattcactccctagaagttacagggcggaggcctttggctcctagaggtggttcacattccctgccgtgtggcctgctccacaggctgttcacttgactgcagcttgcttcttgctattaggatatggcaaaggtgctagaagtcacctccatggttaagctgtaccttgcaagcatgcaggagtccggcaggagaatctcctatgcatgcttgcaaggtagagcctaatcgtgggagtgacttatagcacgtttaccatttttctattggctgratgcaagtcccaggttcactgaycctttatacagagcatgacagtggggtcctcactagggtctgtctgccactctacatatttgaaacaggagtggcttctcagaatccagtgaacctaaattttagttttagttgctcactggactgggttctaggagaccccctgtgttagtctgtggtcattgctagagaatcacttaattttttctagactctaggagaaaacagttggtggtgtactcatcacgggttaayaatttcttctctccttccataggcatggaaggcagcacaccatcatgccttcaaaggtcaactaccaggcgaacatctgggctttgaaggaagagggctgtacacatgtcatagtgaccacagcttgtggctccttgagggaggagattcagcccggcgatattgtcattattgatcagttcattgacaggtaagcagtcatacaaaatgctttaggctattgtagctggtcattttcagctcaaatggacgacgcgtgggaaccggcagggcaactgggagggcagtgccacagacttgcttgcttttttttttttttttttttttttttggagacggagcctcactctgtctcccaggctggagtgcagtggcatgaactcagctcactgaaacctccgcctcccaggttcaagcaatgcttctgtcttagcctcccgagtagctgggactacaggcacatgccacaatgcccagctaatttttgtatttttagtagagatggagtttcgtcatattggtcaggctggtcttgaatcaggagatcacccgcctccgcctcccaaagcgcaaagtgctgggattacaggcgtgagccactgcacccagcctgtgttaagcttttcattgtgagtttttgttttttaattttaattgacaartgataaatgtatatatgaggtataacattatattttgatatatgtatgcattgtacaatgattagcaaagctaattaacatattaccccacatatcatctttagtggtgagaacatttgatttttactttaacaattttgaaatacataatacgttgtcattagctataatcaccatgcagtataatctcaaaaacttattcctcctgtctaactgaaattttgtgctttgatcaacgtctccccaaaccccagcccctggtaacctttctactctttacttctatgagtttgacttagttagattccacatataggtgagatcatgcagtatttgtctttccatggctggtttatttcacttaacataatgtccaggttcacccatgttgtggcaattgacagagttgcgttctcttttaaggctaaatggtattctgttgtgtatatataccacattttctttttttttttttttaattgtacttttaagttctagggtacatgtgcacaacgtgcaggtttgttacatatgtgtacatgtgccatgttggtgtgctgcacccattaactcgtcatttacattgggtatatctcctgatgctttccctccccactcccccaaccccacaagaggccctggtgtgtgatgttccccttcctatgtccaagtgttctcattgttcagttcccacctatgagtcagaacatgcggagtttggttttttgttcttgggatactttgctgagaatgatggtttccagcttcatccatgtccctacaaaggacaggaactaatccctttttatggctgcgtagtattccatggtgtatatgtgccacattttcttaatccagtctatcattgatggacatttgggttggttccaagtctttgctattgtgaatagtgccgcaataaacatacgtgtgcatgtgcctttatagcagcatgatttataatcctttgggtatatacccagtaatgggatggctgggtcaaatggtatttctagttctagatccatgagaaatcgccacactgtctkccacaatggttgaactagttcaccttcccaccagcagtgtaaaagtgttcctatttctccacatcctctccagcacctgttgtttcctgacattttaatgatcaccattctaactggtgtgagatggtatctcattgtggttttgatttgcatttctctgatggccagtgatgatgagcattttttcatgtgtcttttggctgcataaatgtcttctattgagaagtgtctgttcatatcttttgcccacattttgatggggttgtttgatttttttcttgtaactttgtttgagttctttgtagattctggatattagcccttagtcagatgcgtaggttgcaaaaattttctcccattctgtaggttgcctgttcactctgatggtagtttcttttgctgtgcagaagctctttagtttaattagatcccatttgtcaattttggcttttgttgccattgcttttggtgttttagtcatgaagtccttccccatgcctatgtcctgaatggtattgcctaggttttcttctagggtttttatggttttaggtctaacatttaagtctttaatctatcttgaattaatttttgtataaggtgtaaagaaaggatccagtttcagctttctacacatggctagccagttttcccagcaccatttatgaaatagggaatcctttccccatttcttgtttttgtcaggtttgtcacagatcagatgcttgtagatgtgtggtattatttctgagggctctgttctgttccattggtctatatctgttttggtaccagtaccacgctgttttggtgactgtagccttgtagtgtagtttgaagtcaggtagtgagatgcctccagctttgttcttttggcttaggattgtcttggcaatgttcatggttccatatgaactttaaagtagtttttcccaattctgtgaagaaagccattggtagcttgatggggatggcactgaatctataaattacctatggccattttcatgatattgattctacctatccatgagcatggaatgttcttccatttgtttgtatcctcttttatttcattgagcagtggtttgtagttctccttgaagaggtccttcacaacccttgtaagttggattcctaggtattttattctctttgaagcaattgtgaatgtgagttcactcaagatttggctctctgtttgtctgttattggtgtataagaatgcttgtgatttttgcacattgattttgtgtcctgagactttgctgaagttgcttttcatcttaaggagattttgggctgagacgatggggttttctaaatatacagtcatgtcatctgcaaacaaggacaatttgattactcttttcctaattgaataccctttacatctttctcctgcctgattgccctggccagaacttccagcactgtgttgaataggagtggtgagagagggcatccctgtcttgtgccagttttcaaagggaatgcttccagtttttgcccattcagtatgatattggctgtggggttgtcataaatagctcttattrttttgagctacgtcccatcaatacctaacttattgagagtttttagcatgaagggctgttgaattttgtcaaaggcctattctgcatctattgagataatcatgtagtttttgtctttggttctgtttatatgctggattatgtttattgatttgcgtatgttgaaccagccttgcatcccagggatgaagcccacttgatgatggtggataagctttttgatgtgctgctggattcagtttgccagtattttattgaggatttttgcatcgatgttcatcagggatattggtctaaaattgtcttttttggttgtgtctctgccaggctttggtatcaggatgatgctggcctcataaaatgagttagggaggattccctctttttytattgattggaatagtttcagaaggaatggtaccagctcctccttgtacctctggtagaattcggctgtgaatccatctggtcctggactttttttggttggtaggctattaattattgcctcaacttcagagcctgtttgttattggtctattcagggattcaatttcttcctggtttagtcttgggagggtgtgtgtgtccaggaatttatccatttcttctagattttctagtttatttgcatagaagtgtttatagtatgctctgatggtagtttgtatttctgtgggatcggtggtgatatcccctttatcattttttattgcatctatttgattcttctctcttttcttctttattagtcttgctagtggtctatcaattttgttgatcctttcagaaaaccaactcctggattcattgattttttgatgggttttttgtgtctctatctccttcagttcttctctgatcttagttatttcttgtcttctgctagcttttgaatgtgtttgctcttgcttctctagttcttttcattgtgatgttagggtgtcaattttagatctctcttgctttctcttgtgggcatttagtgctataaatttccctctacacactgctttaaatgtgtcccagagattctggtatgttgtgtatttgttctcattggtttcaaagaacatctttatttctgccttcgttttgttatgtacccagtagtcattcaggagcaggttcttcaatttccatgtagttgagcagttttgggtgagtttcttaatcctgagttctagtttgattgcactgtagtctgagagatagtttgttataatttctgttcttttacatttgctgaggagtgctttacttccaactatgtggtcaattttggaataagtgtgatgtggtgccgagaagaatgtatattctgttgatttggggtggagagttctgtagatgtctgttaggtccgcttggtgcagagctgaattcaattcctggatatccttgttaactttctgtctcgttgatctgtctaatgttgacagtggggtgttaaagtctcccattattattgtgtgggagtctaagtctctttgtagatctctaaggacttgctttatgaatctgggctcctgtattgggtgcatatagatttaggatagttggctcttcttgttgaattgatccctttaccattatgtaatggccttctttgtctcttttgatctttgttggtttaaagtctgttttatcagagactaggattgcaacgactgcctttttttgttttccatttgcttggtagatcttcctccatccctttattttgagcctatgtgtgtctctgcacgtgagttgggtctcctgaatacagcacactgatgggtcttgactctttatccaatttgccagtctgtgtcttttaattggagcatttagcccatttacatttaaggttaatattgttatgtgtgaatttgatcctgtcactatgatgttagctggttattttggtcgttagttgatgcagtttcttcctagcatcgatggtctttatattttggcatgtttttgcagtggctggtaccagttgttcctttcctccaggagctcttttagggcaggcatggtggtgacaaaatcctcagcatttgcttgtctgtaaaggattttatttctccttctcttatgaagcttagtttggctggatatgaaattctgggttgaaaattcttttctttaagaatgttgaatattggcccccactctcttctggcttgtagagtttctgccgagagatctgcttttagtctgatgggcttcccttgtgggtaacccgacctttctctctggctgtccttaacattttttccttcatttcaactttggtgaatctgacaattatgtgtcttggagttgctcttctcgaggagtatctttgtggcgttctctgtatttcctgagtttgaatgttggcctgccttgctagattggggaagttctcctggataatatcctgcagactgttttccaacttggttccattctctctgtcactttccggtacaccaatcagatgtagatttggtcttttcacatagtcccatatttcttggaggcttcgttcatttctttttactcttttttctctaaacttctcgcttcatttcattcatctgatcttcaatcactgataccctttcttccagttgatggaatcggctactgaggcttgtgcattcgtcacgtagttctcgtactatggttttcagcyccatcaggtcatttaaggacttctctacactggttattctagttagccattcgtctaatcttttttcaaggtttttagcttctttgcattgggttcraatttccttctttagctcagagaagtttgattgtctgaagccttctctcaactcgtcagtcattctccatccagctttgttccattgctggcgaggagctgtgttcctttggagggggagaggtgctctgatttttagaattttcagcttttctgccctattttttccccatctttgtggttttatctacctttggtctttgatgatggtgacatacagatgtggttttggtgtggatgtcctttctgtttgttagttttccttctaacagtcaggaccctcagctgcaggtctgttggagtttgctggaggtccactccagaccctgtttgcctggatatcagcagtggaggctgcagaacggcgaatgttgctgaacagcaaatgttcctgcctgattgttcctctggaagcttcgtctcagaggggtacccagccgtgtgaggtgtcagtctgccctactggggggtgcctcacagttagcctactcggggttcagggacccacctgaggaggcagtctgtccattctcagatctcaaactctgtgctgggagaaccactactctcttcaaagctgtcagacagggacatttaagtctgcagaggtttctgctgccttttgtttggctatgccctgcccccagagttggagtctacagaggcaggcaggcctccttgagctgtggtgggctccacccagttagagcttcccagccactttgtttacctactcaagcctcagcagtggtgggcgcccatcccccagccttgccgccgccttgcagtttgatctcaggctgctgtgctagcaataagcgaggctctgtgggygtgggaccctccgagctatgcacgggatataatctcctggtgtgccgtttgctaagacagttggaaaagcacagtattagggtggcagtgacccgattttccaggtgccgtctgtcaccccttccctttgctaggaaagggaattccttgaccccttacgcttcctaggtgaggcgatgcctcaccctgcttcggctcacactcgatgggctgcacccgctctccggcacccactgtccgacaagccccagtgagatgaacccggtacctaagttggaaatacagaaatcacctgtcttctgcattgctcatgctgggagctgtagactggagctgttcctattaggccatcttggaaccgcctctcccacattttctttatctgttcatctgttgatggacgtttatgttgcttccatatcttggctattgtgaataatgctgcagggaccatggaagtgctgatgtctttcttgacgtaaaatttcatttccttatacactctgagatgggattcttggatcatgtggtagttgatattttcagttttttggggaattttagtaatggctgtattaatttatattcctaccagcagtatacaagggttctgtttttgtcacatcctcatcaacacttactttgttttgtcattttgataatggccattgtggcctggcacagtggttcacgcctgtaatcctagcactttgagaggttgaagcaagaggattgcttgagcccagaagtttgagaccagcttgggcaacatagtgagaccttgtctctgtaaaaaataaaacaaaaattagccatgtgtgttgatatacagccattgtcccagatacttaagagactgaggtgggagaatcgcttgagcctgggaggtcaaggctagaatgattcatgaatgcaccactacactccagcctgggtgacagcaaaaaagccattcaggtgtgaggtgatatcttattgtggtttttatttgcattttcttgatgattagtgatgttgagcatttttcatacagctgttgtccatttatgtgtcttcttttgaggaatgtctattcaagtcctttgcctatttttttaatcaggttgtgtttttagaactttctttcatttagtttccttacgtattttgggtattaaccccttatccgaggtatggtttgtaaacatttttttcctatctataggctgtctctttatattatgggaatttttaaacatatacacaaaagaataataatcagggactctctaagttcctaattcctagcttcaagagaacattttctttttttttttttttaaagagagtataaattagtatttccttagtattagatatctaggaagttctctctattgtctcatgaactttttttttaatagttggtttgttcaaataagggtccactcattacacacataagcttaataagccttctagtctggaagattccaccttcttttttccttttccttttactgcctatccacattctggatgttactaattgtatcaagtgtcatttagtgtcttctcccggcccctgtgtttgctataaactggatttagttctggtggcctgatcagaaccaggtttgaattcttggcaaggrtccttccttctgcatcctgtcrgaaggcatgtgatgtccagttgtcccttcataatgcgatcgatcaggtgccagaggtgctggggttttgtttattattattattattattattattattattattatwatttaactgcacaagtaatatatattgttcctttacccccccaaaaaaacaacaataatagactgccaaatttttggaccttttctgcatttagaggtagttgaaatcacaagggaaagtggtggtctctaggtcagggatcccccacccctgtggcttgttaggaaccgggctgcacagaagaaggtgagccgtggggcgagagcgagcattaccacctgagctccccatcctgtcagatcagcagcagcattagagtctcataggagcaggaacccaattgtgaactgcacgtggaagggatctgtgttgtgcactccttatgaaaatctaactaatgcctgatgatctgaggtggaagagtttcatcctgaaaccatcccctctgaccctctctgtggaaaaattatcttccatgaaatcagtccccggtgccaaaaagattaggggcagctgtactagggccaccccctcccctattcctggtagaaataattgcctctcagaatgctctgggtgaagacaggagcctcctgggctggatggagagtggagagtagcgcagagttaaatcatttggggatccttccacaatcccccatccaatcaccctgcctaccacctcagtccatgctgctcctcccatcagttatctctgagcttactgtactcacagcctgctcctagagcttctgctatgggagagagggttgtccagtccaggccactgtggcttctgcctttcagggattcattatartttccagtctatcagaagcattcttggttgtttcctgatggaatgaaactgttttgaaattgcccattctgtaggtcagaaatggttgaatatcagcagtttcatgtggttcaacctaataaataatggggttagactaaaatggttacatatttctcaccccaagttatgtccttataatgtatttatacctgacattatatatttgtgacctgtttccctctaagccatgtgagatcaaagtcactttctgcccagtttgcaccatatcaccaacacccacaacagttcctggcccatctttgctctgtcagtaatttttgagggcttgaacatagtcatttgaatagagagataggctggagtttgtgttttggagacatcttgatcaaaatctcaatggctgtcaacgtccatgtgtttggaggtaatagtttaagaaaatgattataatatgattgctaaatagagtggaatacaaaactccatattcaggatgatccagatgtataaagtattacagatgatactgtaaagtctgaattgggcactgagccttgggttaatctgttacttaaacagtatractatacgctgttgcatttcccagatcttttactcacatgtcttaaatgtagatgtttcacatactggctctttcaagaaagcagttgggtcagaagatggagactagaaagaaaacmggtattgccatcagatctggtttcattctatcttagccaggtaaccttaagatcttctactatttttctgtttatgagacatatggataacctgccctcttaatgtttccttggaagttcaaagtctctaayaagtgccttttgtgggatcttgcatgtgttaaccttctcagtaactgagtgccattattgagagtgtgtgcatactggctggagggtccactagttgacactactttacaacaacaggaggaaagaatctgttaaaagaaggatccctggcagggtgcagtggctcacgcctgtaatcccaacattttgggaggctgaggcaggcagatcacctgaggtcaggagttcgagaccagcctggtcaacatggtgaaaccccgtctttactaaaaatacaaaaaaaaagtagccaggtgtggtgagcacctgtaatcccagctactcggaaggctgaggcaggagaattgcttgaacccaggaggcagaggttacagtgaaccgagattgctccattgcactccagcctaggcaacaagagtgaaactccatctcaaaaaaaaagaaggatccctaagagaatataatttagcatgaaatctcaatttttacattgattacttatttggggtgataacgttttgaatatattaggttagacaagattttaaagttaattttacctgtttctcttttactttttcagtgaccactagaaattttaaaactatgtaggtggctaacatcatattgctgttggatgcatcttttaagtgctgctgcctttgattgagctgagtgggttccagttaaccaggcttgagcacatatatcattcattatgtgtttgaacatctcatagcagaagatgccttgcatatatatcattcattatgtgtttgaacatctcatagcagaagatgccttgtggttaatgccctctatgtgttttactgatagcacatttcttagtaaagtgaatcttggtgtattgagacgggcatctcctacctccacttgctgatggcatcagatacaaataggctgtgccatttttagcctggggtttcccagagtcatacccacagccccaacttgtttaacaggattgtaacatcctgtaaagccaccccgtggattatagaattccagggcagctggggcaggagcattgaatcaggaggtttcatcttgactctgtttggccctgtgcaaatcactttacccactacacgttggttctttcttcccaatggagggctgaattgcaccatctctctctctcattcttttgttgtttttttttttgtttgtttgtttttttgagacagtcccactctgttgcccaggctagactgcagtaatgcaatctcggctcactgcaagtgtgagccactgtgcctggccaggctccttttccctacactgcccgtgtattctctccagggacttacctagaaccacacacattggcctattgccgwaagtttgtcagcacgttgtctcagaaaaaaaaaaaaatcctcatcctaaagtgttcttcaaaggctagcgagattgtttaataatacggctattcttattttatagatggccaagctaaagcacatcattttcttttccttcagtgccagcatgagcagggcggggggaccaacctcagatttaagaaagacatgtggctgatttttagggttgtttttagaaacattagatttcttctctaataatgaaatatacttttgaaggactctgacaatgctggaagctcttttaagaaaaatgtcattcttatctgaaaatctttttttttcttctctctctcatgctacattacagctgatgaagttaaaaagcctgggcataagaaaaggggagccctgggtgtgactgccctggaaaaagaggtagagagtgcagtgggttcaagtatgtttgggtatgtgcagtcagtctttgtgtctttctcattcaagtaaattccatagcaattaaagtgaaaataatcatctttcatttgtgagtagagcatccatrgaaagcaacatatatcttggtctagaacttaaattccaaaagaatgtgttatatttttcattttcccgtttttgttgcacagggacgagtttcctgatgcttccttgccataggccctgggctctgtgtgtagtgttcttcccaaaccaaaaattaaaaataggaaaatcagaatctataccaagaactttgtctaggaggcttgtctgcagtaggtttcttcagtgcctatgcctcctgctggattgtgtttgattaatccatttcttttaacttgtacaaggtccccattgttagagccacaagtcatttggccactgarggtaaaagatggttaggagtgggatttgttccacttctttgcagcgattaaacagtcagtttgaactggggaaagtatttgacctttagtctgtcctaaaagaatgtcatcaggctgtttatacattaaaaggctctcataagatatgtactcccagattcataattttggaacttctctcctatggtacacacccttgtatgtatgcacacctggctctcactgagtcacttatgggaaactgaagcaagtttttctattaataggggaaaaaagacctcataaaagagtcaaagtaaatgagacttagagaaatgtagaagcatgactatgcatcactggrcctttgcttagtttttattcatcagccatggagaagaaaggcatgactctttcctgcctcccacacccaccggacttgtaaagctcgacttcgatgatgcattataaagtggtgcacaggattggtttttaatgagatttttgccattggagcaaagcaagactgtttccctgccagctgctttattcaagtcatgaggcattttgttgtctcctcctgtacttgtggtacatgggccctccattttctagcccagttcttgttagatacctttgcacattcatttgtatgtatggcagaactgatgatatggcctttctttcacccccaactactaactgtccatgccattaaagatacatggacaggggattccagcaatttctacagttgctcttctttctctttaccattaatcctgatgattgtaggaaatcagtacaccatatttattatgcaaatctaagaaaaacaactagatctataaactatttgaaaagatgcccacattgtatttttttgttgtttttttagataggatctttctctgttgcccggggtagagtgcagtggcctgatcgcagctcactgtagcctctacctcctgggcttaagcaatcctcagcccgtctagtagctaggattacaggaatctgccactgtgcttggtaatttttttttttaaggagatggggtctcactatgttgcccaggctggtttcaaactcctggcctcaagcagtcttcctgctttggcctccccaaagtgctgggattataggcatgagccactgcacccagctacrtattttttagaaaaggatcagatgagtaggacttgctcaactgctatcactgtcagaaatatctcaaggtgaaacttgcaaacatatcagtaaggagaaggatgagatttcttttttaatagtcttctttatcaggaatgttttgcagatattgattttttttttttttacaatgagaaaaatatgaccaaaaactgaatattaaaggaagcagagtgtgattcccggtgctaaacagtttctataaaatgtggctaataacatattggcctgttgtgcctaaggcctgtgtttgggttatgccttctcaaagaatgcagtggaagaatctcagcttagaagtgaggacatccagaattctttcctggctgtgccgtgaaattcctttgtcacttagtgtcctcatctgctaaatgagggtgttgaattgattcctaaaagttctggtatcctcccctcttcagattatttcttcaacttattttcttggtagaactgggagaggttcgactttgcttttgtcacgcattcttactcatcaggaaagtcccgctataaacacagtgctgagggatcagttatgtcagtctgtttccttctcccagagaccagccctgccttgggcttcccctagaactttatgtcatagcataaaggcccgtgtctgggccctgaggttgggagtatgctctgatgtcaagtatttgatcattctctttctgcctcttgatgactagaaagcgttttatggtaaagagttacgcaagaagcctttgtttagctctttctctcattgctaaaaatagtaagctgtttttaacccttactgttcttacttcttcttactcatttccctcactctttagctgagaatgtcacctccacctttatagagaagacagaaacttaagcataaactcttcaccttccttcaccttccctttccccagttacttgcgtccctgttctttgtcatcctcttgtctgtagctgtccttgaagtggtgtccactattcccctggatgaggttcattcttacgttctgttccataacctagttgtgttattaacttcccatcatacatccttttattaaaaatcctacactaccrgtttttgagttcctattaggtgtcacaatcagttaatcccacttacggcatacagcagtcattattccagtttatacttgaagaaacttaggcccttactatgtttctggcactgcttattatcacagctctagaagacatcttctatctaccttatccttcccttttacaaaaggtgagaaaactgaggcccaaagaggttgttgtcaccacctatgtagagtgaggatttttatttttgtgctattgtttagcatgatctcatgaaatataatagaaaataaggggaaactatggtacctgyttattgagcagccttccttgactgggatataaacatccattggttttcctcctttttcatgccaccacaagcactcaggggcactcttgataccagaacagtgggaggatcttagtgatattggtccaaattcataagttttcacttctcttttttttgagacaagatctcactctcgcccaagctggagtacagtggcgccacagctcactgcagcctttacctcccaggctcaggtgatcttgccacctcagccccccaagtagctgggactacaagggtgtgacaccayacccagctaattttttgtatgtttttgtagagacagggtttcactatgttgcctgggctgatcttgaacatctaaactcaagggttccacccaccttggcctcctaaagtgctgggattacatgtgtgagcctcacttccttctggttatagagacagaattgttccacttcttagtctgatgtttctgtcagaattttttctcatgactgcctattcacgctgctgtttgattcttgggatatattttaaatgatgggtagattcacttcccctaaaccgtcctccttatgagcagccgttattctgctctgccagtaarttaattgactcacgattctgcatgttggggcttgttgtggatacagaccgtattctgaaatgtcctcagaggtcgatgattgtgtttgcttctgccaggggatgggtgtttgccctcagcttgtttgcaacaccacatttcctcaaaggaaacgtattaactaacagctatcttcaagccaatgtaagagtcttgattcaagaaacaacctaccagtcagtctatttctaggcttttctccctctctttgaaagtgccagtgttcttcctttcactctcttgaactcatttttcctgccagcacacatcattttgtctcctttacttttccataggctgtttttttttatttgtctactagcttttcttatcacatatccctgcttgacaaccttaagcaatttgttggatacccttgatttgaggcccatcaatatgtcatactttgggattggcagaagaaatgtttagaagcatattttccataaatgatagtgacaagtgccaagcacttgcttcatgttgtctcattcagttttcacggggacttyataaggtaagtgggattactcccgtttaaggaaactgatataactgaggtgcagagagacgagagtgactttcccagaggcacacagctagtgagtggtaaagccagtagataagccagtccctgaaatccgtgttttccagtaggatcccaagctatggggagataaaaattagtccccttgcctagctagagggctttaaaggttaaagcaagaggaagaagcagaccttatcttttagttctgtaagtttggagtgtatcgtgggtctcactgaaactagaaaaattgtcagcacggctgcattcctttctggaggcttagggtagaatccctttccctgcctttgccactcaccttggcatatggccctcatccatcttcagagccagcaatggcaatggagtcctcacctctcatcatgctgacattgactcttctgcctccgtcttccacatgtgaggactcatgtgaagacatgccgcacacctagttaatccagaataacctttctattttaaagtcagcttgttagcaaccttaattccatttgctctcttagttcccctttgccatctaaagtaatatattcataggttctaagggttagcatgtggacatcttcggaggggccattatttgaaatctaaaatggagatgttattgcatcgcagtctattgggaggtagccactggaggtttttgcagccttgtttttatatttaagcaagggtgtatatgtgtgtcttagtctgttcaggttgatacaacggaataccatagactgggtagcttctaagcaacagaaatttctcacagtcctggaggctgggaagtccaaaaaaagttgccagcagatttggtgtctggtgagaacctactttctcacagatagcaccttcttattgtgtccttacatggtggtagaagggcgacctagctctctgggatctcttttataaggggtctgatcccaatcatgagagatctgcctaatcacctccaaaaggctccatctcctaataccatcacatcttgtgagtttggatttcagcataggaattttgggaggacacaaaacttcagaccatagcagtagggatgttgctaatacctcacgaagaaagaacttaaagaagctgagtaatttgcccaagaccacacaaaaattcattcgaatccagggacaaaactatatttcctgtgttttctccatgtcactcagaaaattcagcatgagggagaaatatgattcttaatatagaatcatatttctatattgaaatatgatttcaatatagctgttttggctagaacttggaagtgaacaggcaggcttaattgggcaacagtccccactttgtggggtgtgatcggcaggcttattccaggcttcttgctgagttataaaacttctgatttatctgatagagaccttcagaaggaggactggtgctattaaaattatacacatttcattctggaatttcttttgagggcatcatccactcccctcagctgtgattgtaaacctcattgctcttggtcagaatttcattcagcattaacaatgacacatcctgttatgctgtgcaggtgtattgctgtttataggaatttaagtttagatcattaaatgtttcaatactgaatgtattgacagttaagttgatgacgcagaaaactacaaatagctgggcaaactataagaggtgtttctcgtctgcaccttcccttctggtatcttgatagtatagcccaaaaatggttttaagcccttgcttctcccccagggctaccctctttgcttgcaccttacaaggttgagtgttgtgaggccccatctggtgccgactccaattctgtctctagcccagacccacacttgtgagctgctatgagttatctgggcatcttggttgacttaatcttcctaacatccttgtaaataggtggatgaatactatgttttatgattggaaaatgaagaatcaaaaagatatggcaatttggtttaagtccacatagctagtagttagggagctttgttgagaaagaaaaatgcatgagaggaaattaagactgtagttaataattatcaggtgcatattaacgttgcatgaagcttaacttaaatacatgttattcttaaggttaaaaagttcaaaacaaaggcgggggttccaaggcaaatgggtggggatagacaggagatgggcagaggtagatgaaatgcgggtgttatggtgtggaagtcagttggagtatagccactggaggcttttgtggccctgttcatatcatagttataagtgggatgttgctaatgcttgactcatcaaaggctgaaacaaagccagagctgaagttgagtacgtgtcaccgttttattggttaatctttcaaaaagagaaaagcctctgtttatacaggctgaaacagtcatttgacctgttcttcaactccatctggaattgctttggggttaacttagcatttcccctaaagcgcatatgacagtgggttgggaggagctcggatggggtttttgttcctccagagcgctgaggccttatttctgagtgaggtggccttggtgccagctaatgccactgtttagtgtgtgatgaactagaagtaacaggttaattttggccagtagacttgccagctgtgtaaacggaaccagtgaaactatttctcagtgctgcctcccacccctggaagaggacatcatgttatctacctgcccctgttggcttcccttgacccatctctcccatgctgtcccctcctccctgtgttactcatcagttcaaatttagaataattgaatgcacagagaaagtggcttgttctgaaaacttctgacaagaaatttccaggtgacttggtgctagattaattttagcctctcttatggattcaaaactgttttgtcagaagacttgaactaagacactttagaattaattacggctgggaaaaagaacaatctaaatgaggcagcgaacaaagattcctaaatatggagcaagacaagtggctctttatttcagtgggtcactggcatgaaaaaatatagttggggttacaggcaggaattactcttagagacatgggaattaaatgcaaggtaagtaccttgtttggaccctgaaactaacaaagcaactgtttaaaaacaaatttttttaagacattggggaaatttgcatctgctctgagtcaaagcctgggatttgtgtttgtgaaaaagctaatagaggaagcaagttggacacaatttaagaaattgttgaatctgggtgatgtgtatatggtgttaagtatatgattttccacgtctgtgatgatgaaacatttttgtattgacttcttaagtgtcttacctggcctttctgagcccacagttgagttgcacctgcaatccaaagtggttaccccgtcacggctgccagaccacagacactttaattcttgttgtgcggtgtgttgctgccagcccagagccaaaaaagcggaataccaccctgaagcttttgtaaacaattgtctttagcttatccagaggaattgagtctggagtaaagacccaaatattgacctagataaagttgactcaccagccctcggaggatggaaagatggccttaaaataaaacaaacaaaaaccttttttgctttattttgtaggaccactatgagacctcagtccttctatgatggaagtcattcttgtgccagaggagtgtgccatattccaatggctgagccgttttgccccaaaacgagagaggtgtgtagtctttctggaaggtgtaccagaataaatcatgtgggcttggggtggcatctggcatttggttaattggcagagcgagtggccccataccctcactcaagtttgctttgtattatgcaaagttttatggagagttatttcctgttgctaataatttcctgttcctctgttactctcagtcattttaagctgaaccactcaaagttgcaacctacctttttaataagttttgattttgctatctagataaaatgatttaacatagaatatcacattactcaagagtatgcagtctggagccagattacttaggatcaaatctctgctcttcaacaaagtagctgtgtccaagaggacaaattatttgacatatgtgggtttcagttatcttacttctaaaatgaagataattatagcatgtaccttataagactgtgtgagggatgagagagttaatacttaatgaagtctctgaaccatgcctgtcagttatggaacatccaatggctggtaactgcttttgtgaattaaattactattattgatcttctaaaaatggtcagattggcagctgttgcctttgacctgagtttggccattactgcccagccttctgtctaccattatagccaaatcacagaactatggggacagccccacaagggccagtggtggtataaggggtggaatcacagttttagttcccaagcaacaaaaatggctaccatgactaagaagcctatggcttggtccacatgtgctacttctcttataatcccaggtttgaaagtcaggtgcaactcaaaagatcagaagtatcgttagagattaactgcttcataaaatctcccttatgagttaacttagagaatataaatacctaaacacgttagttattcagataatgttaacacctgcatatagagagtagatgatttcttttagcatttatgttttatcctacataatcacagaaaacccatttccttatagttaacagcaagggcacctaaactgaggacacagggttgggagaaatatttctagtctcaaacaagaatttggaatctaaaaccgagtactgagggaagccatttcggagataccactgcgcattgattttctctgacttctaggaaagtacgtcttttacttggttttttttttttttttaaaaagtggcaggcgaagtttgtatatgtatgtatagcatgtttctggatagttatccacagaatgtatcagaatgctgctagtcttcctctgaagcacagatctgtccacataatagatttgctatcctgggggaaatgaagtatggataaaattcttgtccacttcaaaatgggggcagcttgggaagaaatagtctaaggagagaatatgcatgctcgtatgaatctgaggtcagttctcaggcaaaatacagtgacttggggaactaggagtagaggtagatggggaaagcacaatggagctgtatagagcacatgtaaatgtgggtctgtggtgataatttccagtaatccaagttagcctcccttgaagccaaattaattcagcttcataaagactgagagaatactgggaaaggcaatttaagaaaatggcaaaataagcattcagaaagaaatttttaaatattatccaaaaacatgaagagtaaatagtgctgccacttggtaattttcacttttaacatccacatgatctttcatgtactgatggaataggactgtcatgatgaattgtcaagtggcaagcaagatactcagtggttgtaccatattctaccatttatgttaaagtatgtatatatacaaagaagtaagtatgtaaatatttatatacaaataaaatatttttggaaagttaacaaaaaaagctggtaacaggaaacagggaagatggcagataagagacagggctggccaccacggtggctcacgcctgtaatcccagcactttggaaggccaaggcaggcggatcatgaggtcaggagatcaagaacattctggctaacatggtgaaaccctgtctctactaaaaatacgaaaagttagccaggcatggtggcaggcacctatagtcccagctacttgggaggctgaggcaggagaatcgcttgaacctgggaggcagagcttgcagtgagccaagattgtgccactgcactscagcctgggtgacagagactccatgtcaaaaaaaaaaaaaagtaaagaaaagacagggctaacgtgcagcttccacaaggacggacagaatagcatatggagacrctatgatcttttgttccaagaaccactgtaggaacttaccgggaaaaccaaaagaattcaaagatcctttgaaagaagtggcacaccaytgcaaattctgcaaaacaggcaagaaactgagttcccaaagtgtgagtcggggagaacctacctctgaatacacatccccactggggaaatctaaaaatccagatcatggaggaagaatttaaccttacctagaggtgaaacggatttagggggttatgtgaaatatgaaagtagaagtagcaacaggaagtgctttggatgtactcccagtctccagcttgagtccagggaagccagccctgactatatctcacagtggccctcaggtaaggcagccagtggaattggagagtgatggcagggcgaaggaagctcccaaatgaaatcagtagtggtttcagctggtcacaaattttctcaggcagagtccargggactaatgggagccrcagcagatacaagtgagtacaggagctgctgctgatggagtgggcaggtgggaaggggtgaggtycaaaggccatgcttgctttcccagtggggtagctcacagcctggggcaaggtctgagcagggcactgcaggagtgagactagcctcaccaactgcatagtagctggatgaggcctcttgctgctggctctcccccactaccctggtaaagtttatgatacagcagaggcagtcaagatctcctctggaacataaacccagtggcctgacaaaccacccccatcccccaatttcccacagtgtctgcagcaagccctgcccaagaagagtctgagcccagaaccacctaaccctgccccaacctgatggtatttccctacccaccctggtagccaaacacaaaatatttattgccctgcctattgcctgggaaaccaaaatagttaccttgggcatcttagggcaagcttagagccccctactccttctgcagctggtgctctcttgaaagtgccacctcctggctggaggccagtcaactgaggccattacagcaactcataaaacaataaccctgatcccaggacggaaaagacaacacctaatttcactgcctgcaacatcctggctaaccagagatcctgaatatgtccacatgacaacttcactgctagcataagcagcattcaagagagccagcacattaaacatatctacaaccaatgactcttgcagagtttacttcacttccctgccacatctaccagagcaggtgctagtagccacagcttggagacctgaagatggatcacatcgcagtactcattgcagacatcccccagcaacagcccagagcctggtggcctcaatgggtggctagacccagaagagcaataacagtcactgcagtccagctctcaggaagccccatccctaggggaaaggggagagcaccacatcaagggatcaccccatgagacaagaaaatctgaacagcaggccttgagtttcaacctctccactaaaatagtctaccaaaatgacaaggaaccagaaaagcaattctggtaatatgacaaaatggggttctgtaacacccccaaaagatcacaccagctccctagcaatggatccaaaccaagaggaaatctctgaattgccagataaggaattcagaagattggttattaagctactcaaggaaatagcagagaaaggtaaaaaccagcataaagaaattttaaaaaacaatacaggatatggatgaaaacttctgcagagaaatatcataaagaaaaaataaatcacagcttcaggaaatgaaagacacacttagagaaatacaaaatgtagtggaaagcttcaacaataggctagaacaagtagaagaaagaacttcagagcttgaagacaaggctcttgaattaactgaatcaagacaaaraaaaagaattttaaaatgaaattttaaaagaaatttgggtttatgttaaatggccaaacctaagaataattggtsttcctgcagaagaagagaaatctgaaagtttggaaaacttatttgaggaaaactttgctggccttgctacagatctagrcatccaaatacaagaagctcaaagaacacctgggaaatttattgcaaaaagatgatcagctaggcacatatttatcaggctatctaaagtcaagatgaaagaatcttaagaactgtgagacaaaaacatcagataacctataaaggaaaacctatcagattaatagcagacttctcagcagaaatcttacaagccagaagccagaagggattggagtcccatttttaacctcttgaaacaaaattattctcagccaagaattttgtatccagtaaaactaagcttcataattgaaggagagatagtctttttcagacaaacaaatgctgagagaatttgccactattgagccarcactacaagaaatgcttaaaggagttctaaatcttgaaacaaaacctcaaaatacaccaaaatagaacctcattaaagcgtaaatctcacaagacctataaaacaataatacaatggtgaaagaacaacgtctttaggcaaaagctagcatgatgaatagaacagtacctcacatcccaatactgatgtcgaatgtaaatgacctaaatgccccacttaagaaaagatacgcaatggcagaatggataaaaatctaccaactaagtatctgcagtcttcaggagaatcacctagcacacatgaactcacaaaaacttaaggtaaaagggtggaaaaagatattccatgcaaatggaaaccaaaagcaattaggaggagctagttttatatcagaaaagaacagactttaaaacaacaacagttaaagcaaagagggacattatataatgataaaaggagtagtccaacaggaaagtatcacatttctaaatatatatgcacttaacacttgagctcccaaatatatcaaacaattactaataggcctaagaaatgacatagatggtaacacaataatagtggggcacttaagtactccactgacggcactagacaggtcctcaagacagaaagtcaacaaggaaacaatggacttaaactataacctagaacaaatggacttaacaaatatatatacccaacaactgcagaatatacattcttttcatcagcacatggaacattctccaaaatagaacatatgccacaaaacaagtctcaacaaatttgaaaatcaaaattatatcaagtactctctcagatcaaagtggaataaaattggaaattaactccaagaagaatcctcaaaactatacaaatacttggaaatgaaataatctgctcctgaatgatctttaggtcaacagtaaagtcaagatggaaattaaaatattctttgagctgaatgattatagtgacacaacttatcaaaacctctgggatacagaaaaagtggtgctaatgggaaagttcatagcattaaattcctacatcaaaaagtctgaaggaggacaaatcaacaatctaaggtcacacttcaaggaactagraaaacaagaacaaagcaaacccaaacctagcagaagaaaagaaacagcagagatcagagcagaactaaatgaaattgaaacaaaaaaatacaaaagataaatgaaacaaaaatatttgaaaatttaaaattgatagaccattagtgaaattaaccaagaagagaaaagatccaaataagctcaatgagaaatgaaacaggagatattacaaccaataccacagaatacaaaagactattcaaggctactatgaacacctttatgcacacaaactagaaaatctagaggagatgagtaaattcttggaaatataccaccctccccaattaaatcaggaagaaatggaaaccctaaacagaccaataacaagtaggaagattgaaacagtaattttaaaaaattgccaacaaagaaaacatccaagaccagagggattcacagctgaattctatcagacattcaaagaactggtaccaatcttactgaaactattccaaaagacagagaaagcaggaatccttcctaattcattctgtgaagccagtatccccctaattacaaaatcagaaaagaacataataaaaaaagacaactacagaccaatatccctgatgtacgtagatgcaaaaatcctcaacaaattactagctaaccaaatccaacagcatatgaaaaagataatacaccatggtcaagtgggtttcataccagtgatgaagggatggtttaacataggcaagtcaataaatgtgatacatcacataaacataatttaaaacaaaaatcacatggtcatctcartagatgcagaaaaagcatttgacacaatcctccatctagttataattaaaaccctcagcaaaattggcatagaagggacgtacctcaaggtaataaaagccatctatgggctgggcacggtggctcacacctgtaatcccagcactttgggaggccaaggcgggcggatcacaaggtcagatcgagaccatcctggctaacacggtgaaaccccatctctactaaaaatacaaaaaaattagccgggcatggtagcgggcgcctgtagtcccagctactcgggaggccgaggcagtgaatggcgtgaacccgggaggtggagcttgcagtgagctgagatcacgccactgcactccagcctgggcaacagagcgagactccgtctcaaaaaaaaaaaaaaaagccatctatgacaaacccacagccagtgttatattgaacagggaaaagttgaaagcattccctctgagaactgaaacaagacaagattcccactttcaccacttctgttcaacataatacaggatgtcctagccagagcaatcagacaagagaaagaaataaagggtaaaaaatcagtaaagaggaagtcaaactgttgctgttcaccaatgatatgatcgtatacctagaaaaccctaaagactcatccaaaaagctcctagataaatgaattcagcaaagtttcaagatgcaaaatcaatatactcaaatcaatagcacttttatagaccaacagcaaccaagctgagaatcaaatcaagaactcaacctgctttacaacagttgcaggaaaaaaaaagtaaaatgcctaaccaaggacatgaaagatctctacaaggagaactacagaacactgctgaaagaaattatagataatacaaaaaaatggaaacataccatgctcagggatgggcagaattaatattgttaagaattcttacaaaagcaatctgccaaaaagcaatccacaaattcaatgcagtttccttcagagtaccaccatcattcttcacagaaatataaaagtatcatatttctgccaaaagcaatccacaaattcaatgcagtttccttcagaataccaccatcattsttcacagaaatataaaaaaaaaaatcctaaaatttatgtgagaccaaaaaaagagcccatatagccaaagcaagactaagcaaaaagaacaatctggaggtatcacattacctgacatcaaactatactacaaggctatagttatcaaaacagcatggtactggtataaaagtaggcatgcagaccagtggaacagaatagagtatccagaaataaagccaaatatttacagccaactgatctttgaaaaagcaaaacaaaaacatacactgaggaaaggacaccctatttaacaaatgttgcaggataattggcaagccagatgtagaagaatgaaactggatcttcatctctcatataaaaatcaatgcaagatgcatcaaagacttaaatctaagacctgaaaccataaaaattctagaaaataacatcggaaaaacctatctaggccttggcttaggcaaagagttcatgatcaacaacccaaaagcaaatgcaacaaaaactaagacaaatagatgcagcttaattcatctaaaatgcttcrgcacaacaacaaaaaataataatcagtggaataaatgaccacccgcagaaagggagaaaatattcgcaaactatgcattcaatagaggaccaatatccagaatctacagggaactgaaacaaatcagcaagaaaaaaaaaaaaggtcgctaagtacatgaatagacaattttcaaaacacatggccaacacacatgaaaaaatgctcaaaattactaatccaggaaatgcaaattaaaaccacaatgcgataccaccttactcctgcaagaatggccataatttaaacatcaaaaaataatagatattggtgtagatgtggtgtaaagggaacacttttacactgctggtgtgaatgtaaactagtacaatggaaagccatatagagattccttacagaactaaaagtagaactaccatgtgatccagcaatcccactcctrtgcgtctacccagaggaaaataagtcattatatgaaaaagacacttgcacatgcatgtttatagcagcacaacttacaattgtaaaaactatggaaccaacctaaatgcccgttgaccaatgagtgaataaagaaaatatggtatatatacagcatgggtgtgatggttaatactgagtgtaaacttgattggattgaaggatacagagtattgatcctgggtgtgtctgtgagggtgttgccaaaggagattaacattgagtcagtgggctgggaaaggcagacccacccttaatgtgggtgggcacagtctaatcagctgccagcatggctagaatataagcaggcagaaaaatgtgaaaagagagactggcctagcctcccagcgtacatctttctcccgtgctggatacttcctgccctcaaacatcagactgcaagttcttcatttttggaactctgactggctctccttgctcctcagcctgcagacggcctattgtgggaccttgtgataatgtgagttaatacttaataaactcccatttatctatctgtcccattagttctgtccctctagagaaccctgactaatacagattttggtaccaggagtggttctagaggaacagaatattaaggatggagttcttttattggtatgaggtttctggagttgactgcttaatatgattagacccaaagatgctaaggactctacttctaataatatggataacaccaatagtccttgacttgaactgtttagagagttatgcaaaataaatatatttgagactcctgattcatcactcgtgagaggcaaggactctacataatacctttgaccatatgtggaatcacccttagtgactctgtacataatacctttgaccatatatggaggaccagggaacataatgaagctggttggttgctcctaagttcagtggacaaagtgatgaaagaaaataatgaactcagggattgtatctcccagctccagcagcagatactgagcctcagatctgctaagattgttctgaatgaaagacttatctcctgtagagaaagagctgaaattgtggaaaaacagacacaagctcttatcatgtgagtggctgacctgcaatgaaaggtacatgcacagcctcgccaggtgtctactgttaaagtgagagcattgattgaaaataaatgggaccctgcaacttggaactgggatgtgtgggaggaccctgatgaagctggggacactgagtttgaaaactctgatgaaccttatttaccagaagaaacagctttcccatccccagaagtggcagcatcccctccctgacctatgctgccatcagccttttcacctttgtctgaggagataaaccctgtgcggcctgaggcaacagtgatggcctcccctgaggcagttgccaggcaagataatgttgattcttctcaggagccacccctaagactcccatttgcttctagacctataactggactgaagttccagcaggcccctagaggtgaggttgagattgtgacccatgaggtggtgtgctacactcaaaaagaaccgcttgagttttctgatttatataaacagaaatctggagaacaggcatgggaatggatactaagggtgtgggataatggtggaaggaaaatggagttggatcaggctgaatttattgatttgggcccactaagtagggattctgcatttaatgttgcagctctgggagttaaaaaaggttctaattatttacttgcttggtttgctgaaatatggattaaaaggtggcccactgtgaacaagctggaaatgcctgatctcccttggtttaatttagaggaggggatccaaaggcttatggaaattcagatggtggagtagattagtcactttagacctatttatccctgctggtccagaaaatatgcccttgaccaatgccttgcaaaacagatatgtgagggcagcactgggatctttgaagagccctgtaattgctcttctctgtatgtcagatctaactgtggtaatgtcagatctaactgtgggaaccgcagtcactcaactacaaaacttaaatacagtgggaataattggattccaaggcagcaggggccatggcggcactcagctgtcaaaggcaaggtgggcatagctaccataatgggcagcagaggcaaagcggcaatcagaacagtctgactcgtgtaaagctctggcactggctaattaatcacagcattcctagaagtaaaattcataggaggcctactgcattcctacttaatttacataagcagaaacttctaggtcaaatggacaaaaaactaatttgaattataaaaacagrctcacagcccctcaaccaatttccagacttgagctagtttacagacccagaaccccttgaatgaaggggaggccaggtcccsttgaggaaggaccccactatattaccaacaatttatgctgtgaatctttctcccgtccttccccaaggagacctccgaccttttaccagggtaactgtgcactggggaaagggaaataatcagacatttcagggactactggacactggctctgagctgatgttgattccagggaacccaaactgtcatgtggtcctccagttaaagtaggggcttatgaaagtcaggtaattaatggagttttagctcaggtctgacgtgcagtgggtcttatgggtgcctggactcatcctgtggtcatttccccagtgccagaatgcataactggcatagacatacttagcagctggcagaacccccacactggctccctgactggtaaagtgatggctattacagtgggaaaggccagatggaagccattcgagctgcctctacctagaaaaatagtaaagcaaaaacaataccacatccctggagggattgcagagattagtaccaccattaaagacttgaaagacgcagggatggtgattcctaccacatccccatttatctctcccatttggcccatacagaagacagatgggtcttggggagaatgacagtggattacaataagctgaaccaagtggtgactccaattgcagctgttgtaccagatgtgatttcattgcttgagcaaattaacacatctcctggtacctggtatgcagccattgacttggaaaatgcctttttctctatatctgtccataaggaccaccagaagcaatttgccttcagctggcaaggccagcagtataccttgactgtcctacctcaagggtatatcaactcttcagttttgtgtcataatcttattsagagagaacttgatcgctttttgctcccacaagatatcacaatggtccattacattgatgacagtacgctgattggatccagtgagcaagaagtggcaaacacaccagacttattggtgaggcatttgcatgccagaggatgagaaataaatctgactaaaattcagggaccttctacctcagtaaaatttctagggggtccagtggtgtggggcctgtggagatactccttctaaggtgaaggataagttgctgcatttgtcctctcctgcaaccaagaaagaggcacaatgcctagtgagcctatttggattttggaggcaacacattcttcatttgagtgtgttactctggcccatctattgagtgacccaaaagggtgccaattttgagtgggtccagaacaggagaaggctctgcaacagttccaggctgctgtgcaaactgctgtgccatttgggccatatgacccagcaaatccaatggtccttgaggtgtcagtggcagataaggatgctgtttggagcctttggcaggcccccataggtgaattacagtggagccctctaggattttggagcaaggtcctgccatcttctgcagataactattctcctttcgagagactgtccttggcctgttactggactttggtggaaagtgaacttttgactatgggtcatcaagtcaccatgcgacctgaactgcctatcatgaactgggggctttctgactcatctagccataaagtgggttgtgcacagcagcattcagttatcaaatggaaatggtatatatatgactgggctcaagcaggtcctgaaggcactttgctgtgcccgtgcatggcctccatccttgccacctggacactttgggctcctcctgcctttaagtcaacaggctaagaagggagttacagtgctggctggggtgattgacccagactatcaagatgaaatcagtctactactccacaatggaagtaaagaagagtacacatggaatacaggagatccattagggtgtctcttagtattaccatgccctgtaattaaggtcattgggaaactacaacagcccaatccaggcaggactacaaatgacccagactcttcaggaatgaagatttcagtcactccacaaggaaaaaaccacaacctactgaggtccttgataaaggcaaagggaatacagaatgggtagtagaagaaggtagtcatcgataccagctacaaccatgtgaccagctacagaaatgaggactgtaattgtcatgagtatttcctcctccttttgttaaaaacatgtttgtgcatatatacagttgtactaagaaaatatcttcattgtattttctttctcctttatcatatgacatgagatttattgacttcacatcaacatttaagtattgctaactttatgtagtagtatttgggttggtgtttggtgcatttscagttgcacaaaggatagctgtattatgttacgtgtaattatgaccttattattgtctttatttgaagattatgtatgatctcaggagatgtgtatggattcatgtggacttgtgatggttaacactgagtgttaacttgattggattgaaggatacaaagtattgatcctgggtgtgtctgtgagggtgttgccaaaggagattgacatttgagtcagtgggctgggaaaggctgacctagccttaatctgggtgggtacaatctaatcagctgccagcatggctaggatataagcaggcagaaaattgttaaaagagagactagcctagtmccccagtctacatctttctcccatgctggatgcttcctgccctccaacatcaaactccaagttcttcagttttggaacttggactgtctctccttgctcctcagcctgcagatggcccattgtgggaccttgtgatcatgtgagttaatacttaataaactcccctttattagttatgtccctctagagaactctgactaatacaatggaatactacttagccataaaaaagaacaaaatgatggcatttgcagcaacctggatggagttggagaccattattctcagtgaagtaactcgggaatggaaaactaaatatcgttatgtcctcatttgtaagtgkgagctaagcyatggggatgcaaaggcataagaatgatataatagggccgggcgcagtggctcatgcctataatcccagcactttgggaggccgaggtgggtggatcacaaggtcaggagttcaagaccagcctggccaagatggtgaaaggggtctctactaaaatacaaagaaaagaattagctggccgtggtggcgggtgcctgtaatcccagctaatcaggaggctgagccagagaactgcttgaacccgtgaggcagaggttgcagtgagccaagatcgcactaatgcattccagcgtgggcgacagagtgagactccatctcaaaaaaaaaaaaaaaaaatgatgtaatggactttggggcctctgggggaagtgggagaggagaatcagggataaaagactacacattgggtatagtgtacatttcttgggtgacaggtgcatcagaatcccagaaatcactactaaagaacttatatacatcacaataaaccacttgctccccaaaaactattgaaatgaaaaaaaaaaaaaagcctggtaataatggtttcccttgggaagggacagtggttttccttgtactatttaagttttgtaccatgtacaaatacgtgttccaaaagcagtgttacttctattcattttaggagttaatatgaaagtmctgacattaaatctgtttaggctggtgatctaatattgctagttccttggtgagggttgtggtactttcactaccacatccgtctgtttagtagttcagtgattacacgaggtaagaaaatgaaatcatcttaaactcagacctggaccttgaccctgtatttgatattttttgctgccttaagatagtgttagctgttcttgaaggaatgcaaaatgctggttcaggtggctgacatatattcatagcctccatttcttcctcctcctcataagcatggtacctatctcccaaagtgccagagtgacagtgaggacttgtcaagagccattcatctctagaagcactgtgaactttagccaagcatayggttcagttattcaggatctttaaagacattattgaaccagcgggagtgggcttgttatgtcttaactttaggggggaaaagggggtggggtagagatttaggcttttgcatttatarcatatactttttagggaaaagtgttaattaagcataattttattttcagcatttataagataaacatgatgtagcatcaactgttcattgtccatagcttgctaaattttgagttgccaagactcttgtgaaaattctgtttcccattgcagtggcatagtgtaagttattttttaaggaaataggttaatttgtttatgtgatgaacacatgtgcaggtgagactttgcccagattggagactttgactttgagtcactccactttatttatatagtatcccaggaaggttagccaaatatgtgtagaagctgccagtattaatgattgttagaagaccagcttagtgcatacagtgtttacagcgcacctggcatgcttctatgcttgtatataccttagttcatttaatcttcctcatacaattgaattatgcgatatcattattctcaatttacacttgagaaaactaaggcatacagagatgatttttcaacagtgcttcagtaagttaacagttaagttgaaaagacttttttttaattaaaagggaatattgaataagctaagaaaaaatgaaggtaattaataacttgaagattagatgtgcagtattaaataaaacactggagaaaaggatcgaacttttcaatgatgtttctaaaaatccatgcctagccttgccactaaaggaattccaagatgtttatccctgtgaacagaaaaacaatcagcacaactctgtggaaaggcaataggcaaaagagaaatcactttctaaccagcaaaagcttttacagaagtcttcagattctgtatttttaaaagtaatgagaattaacttttcagaagcctggaartagaactcaacacacctgtttgagaagataagcgacgagaggcaccttagcttagcctgcgaggttaaaagttaagactccagtctgtattctcaaaccagcttagtctcttaaagttgttaagaagcaaatgagattaaagcatataaacaaatgcctggcgagtagaaagagctcagtgcttgcttgtgtagctattagtttctacatgcaaagggctggggaaacaggattatgtgaatgagaaagggtccaggaaacacccttctgtggtcctctaggttttttctgagagcctggcagatagtaggcatttattatagtgacaaatcatctttaagaaatcaacttggtaaacattggggggaagtgcagccttaagttgtgcatgtgctagtatgttttgaagtttctggtttttcttttctaggttcttatagagactgctaagaagctaggactccggtgccactcaaaggggacaatggtcacaatcgagggacctcgttttagctcccgggcagaaagcttcatgttccgyacctggggggcggatgttatcaacatgaccacagttccagaggtggttcttgctaaggaggctggaatttgttacgcaagtatcgccatggcgacagattatgactgctggaaggagcacgaggaagcagtaggtggaattcttttctaagcacatatagcatgggtttctgggtgccartagggtgtcttaactgtttgtttctattacgttagtttcagaaagtgcctttctacaaggttttgaagttgttaatattttctgtagttccattggaaggtaagaacaaagatcaaargaaagaaagagacacttttacccaaggatcagtagtgaaaatagtacattgtaggcakgtagatgtgttgagaatcatactaagacttgggccttattttcaggataaaggtgtattttgattgccaatttctgctgctatgctactgttttttgttttcaagaaggaaaaaaatctattaaccctttcctcatgagagggctgtatgttcacatccatctatttaacgtaccgtggctggatactctgttcagcatagaaatgtgacaacaaacagagaagtccttaaggagccgacattctgtcggatggagatagaagttaagcaaaccaatataagaaagctaacggttataaagaaatagaatggtgaggtacaagggtacactaggtcaactgaatagagttgaccagaccaaatatttgaagtatgagaagccttcctgttttaagtgtgatgggcaagaagggcatgattgagtagagtggaaaggagggagactggggagaagggagagagaggagggatgcaatacagtagggccaggccatacagaccatggtaagggtttcagatggaaggacagtgaggggttcaggcagggaaggcagcaggatccagctggaatttgaggacactggaacaatgaggtcagcttccaaaacaaaacaaaacaaaactttaaacatctgtgtaagtacagggtggaatataatgaattccaggtacccatcacttaggttccacaattagccatggccaatcttgtgtgataggtatgtccctacctatttctcccctgccctcattgtgaagtaaatattttcctaaaaggtctttttaaaattaagttataaccatgccatcattgtacaaaaataatgatattaatttcttaatataatcaaatattcagactattcctttttccttcartctcataatttttaacaatttgatcaaatcagaatcccttacaatccatatgttgtattttaatgattacctcttgtctcttttaatctaattttcacctctttctctttttattccttgtgttacttgaataaactagatcgttcgtcctgtcatttatctcattttaagataaagggacgacaaaactgcagtcacttttgaagtaaggaaaacatttaggggtgactttctgagcacatttagggtaagtgacatctccaaagaggcctaatattgtaccaccgttttagagagtttgttttactatctaatgtgtacagtgttttgggtcatagatgaacacaggttctttgtttttcatgaattccttatgatgactcttcagtgtaataaactgtttgcttagtactaggatgccttttatgtaagagattcgcaaattattacattaagtcacaacataatatcttatttggcagctttggtaacctmaggaacaactcagcctcgtaatgtcaagaagctgcttccaattaataggaaactccagcccctgccacaccctgagagcggtttgcttcctgcctgtggctttctgctcagtctaataacatatgtctcctcctttgtagaaccagcagtgatttcctttagtagccaaatgaggttggggaaatagtcagctggagctactttattgaaaagcagagaaattaagctctgtaagtggaaaggcttgaagacagtgttaaatgctacaaggaaggcccacagaaagatggcattatttcagccaatcgtgtgttgcagcctggcatggcaaaaaggatttggagttctctaaacccatcttcagatttgagttgctccatttgcttgtcacattgggcgagttatttcacttgtttactcttctgtagaatgaagccagggctctgggtgaggagtggaggttgtttagtcattgtttagtcagttagaccttgaaagattactggaagaattaaaccaaatgagatatgtaaaaaagctagtataatgctggcttgtaagagggtggtcatcagatggtggctctgatggagtggggggcctgagaggtgggtagtatcagggaaaagcatttaaactgcaccttgaagagagggtttattttgggaaggtcagtaggaaggacattttgggtgaagcccaacagctggaacaaagagaagggaggtcagtgtctatacagaaataaccagtcacaggaaaaatatataaggaaatgagtaaatacaaggcaaatttcttggatgcttcatgtctgcattcaaagactcagcttaaaacatatcatttacatgtgcctggcagatacccagcctgtcactgctttgtgttcccatagtagtgcaaactcccctctgctacagtgttcatcattttttcctatacacatcttggtgtttgtgggtgggatctggactatgcttaaggaaatagaaagatgtaatccttgtgtccctgaatgctggatttcttcgaagcataggaaggcatgtcaagtactctatctctgatggtaattttgtgttcactttcttcaactttttcttatgaagctattttagtcatatacagaagtagctaatagcacgagcttccatgaattcagcatctagcttcaaccattatattaacttacaaccaatatgattattactcccatcaataattttatccataaacacttcaggaggtatctaacatgagcacattatcattttcattctccaataataattctttaatatacccagccagaatttaaatttctggttaaatgccttaaattattcttttggttgcaagctttttatgaaggaaccagatcatttgtcctgttgagtttcccacagtctgaattgctgaaatcatctccttggagtagtttaataggcttctctgtcctctgtattgtctataaattggtagctagatttagaaatttaatcagattcaggtgtcttaaggtagcattttattttttcatcaggaagcacataatgagtggtttatttgggattttgtttggttcggtttgtgatgttagcagccaatccattaattcactgggagccataaaaatggtggtattttaattccataatatttttctttagtagctggaataattttctaaggagaaacgtacctgtttggttttccagtgtagcaacagttttaacattgtaatcccttcggctgtggacatgaagagaacagccacatctttctagaccatattaacccattatacatctgagatattttctccgataccatattgaaatctgtattagtctgttatcacattgctatggagaaatacctaaaactgggtaatttataaagaaaagaggtttaattggcttatggttctacaggctgtacgggacgtgatgctggcatctgctcagcttctggggaggcctcaggaaacttccaatcatgttggaaggcaaaaggagcgaggcatctcacatggtgggagcaggagcaagagagagtgagaggagaggtgctgtacacttttaaacaatcagatctcacaagaactcactatcagtaaaacagcacctgaggatgctgctaaaccattcgtgagaaatccaaccccatgatccaaccgcctcccaccaggccccacctcccacaattcgacatgagatttggtgaggacacaaatccaaaccataccagaattcatcagtgcttttcagagatgtcactgagtttctctaggacctccgtgctaggactaagaccatcttgataaatgccgagcttgaactcaggggtttaaacgtagaataaacagacttcacaagtcaggtttttcttagtctgtctggactgttgtaacaaaataccatagcatgggtggcttctgaataacaagtttatttttcacatttctgtaagttgagaagtccaagatmaagggactggcacatttggtgtctagtgagagcccactttctggtagacagccatcttctcactggaacctcacacggtggaaggggccctcgaagaatagcactggggcctcttttgtaagatcactaatcctatccacgaggactctgccttcatgacctaattgcctcccaaatgcccaacctccaaataccctacattgaggattcggtttcagcagataaatttgaggggacacaaacatttaggctgtagcaaggctggagctcagaaaaatgttttatgacaagcagtggaattttaagttctagtaacctccagtgctattgtttctctaggtttcggtggaccgggtcttaaagaccctgaaagaaaacgctaataaagccaaaagcttactgctcactaccatacctcagatagggtccacagaatggtcagaaaccctccataacctgaaggtaagtgtcagccatggacaatcaggcatgtctgtagactctctattgtcttcttttcttacttgcatttcacctttggtcctcatgtattttatgccagcctagatgttttcaacaagtttttgtgacatctactactaccataccaaccacttgtgaaactgagtagtcttattttctggctggtagtgcaagaccactgaaggctagggttgagagagttttattatctcgtgtaccagattcttcacattgccctgctctgtagtatccctaagtcttacttcagaagattgatagtgctttctctgcatatcgcttacattgttgacaaagctattttctctttggcagatccattcaaatttgtggcaatcctttaaagccaaaactctgacaatagtaccaaaatggtgccagaaaatatctgcttaaggttaatcatgcatcaaactaaacagtaattaatgataaaccaactctagtattctcagaatataatttaaactaactgataaactcggagttgcatgatttttctttgggcactttgtgactcttcttaaccacatagggaaagacttgtctcaaactgatcagatattgcattctcctactatccaaagaggaccataccccaaagtctcctagaatacacctgtacttttgggtcttctggtggtggtggagagaggatttgaaaggttgatctaagccctccttacctgaattaccacctaggagctctgtaatgagagagccacagttttagtataatgaggacattgtatggtggtaagtgactgccaatcactgggcatggcagagccttgatttgtaatgtttgctaatttacgtggtacaagtgctccagtacggccagtttcacactactaatgtgaagccactgatgagttgagaagtgatacacacagctcttgcaagctggtacgaacagaatccagcacaccactgtaactaaggtgtctctcagcagttaggactgacggtcaagaatgttggaatttgtagcttatcttccctactaagaaacaaatctattggtttcaacactgtatacctaggacctaaatgttatttaatgaataaatgatactcctttcccccatgaagtgttttatcataatatatagagatgcaggaaacccttattattagaattaaaagggaaaaaatacatttgagtgcagtcaaatggcacaactggagcttgcataaaaaaacgcatgttggtttgccagaaatgtgactcctacttgtactattgttagcaaaatgtcatagaagtttgtttgtttatttgtttgtttgtttgagacggagtctcattctgtcacccaggctggagtgcagtggcacgatctcagctcactgcaacctctgcctccctggttcaagcgattctcctgcctcagtctcctgagtagctgggattacaggcatggaccaccatgcccagctagtttttatatttttagtagagactaaacctagtagatgaccaacatggtttcatcatgtcggtcaggctggtcttgaactcctgacctcgtgatccacccgctttggcctcccaaagtgctgggattacaggcatgagccactgcgcccagccaagtttattttttttaagtctcccaactaaccccactttgaccatagtctttcaaaagcttgaagttaatttctcaaataatatatttactgttttagctttatttttaagtaaaaatgcttgaagagtagaaatcagtgttctcctttcctggagcttctgaaattgtaaaattgtgtgattttatttgtatgcatttttaaagaggcttagtttacgtagctttcatcggattttcaaaggaggattttatatatatgtgtatatatatacacacatacatacatatacacacacacacatataaaacctaaagagagaaaatgaggaattcctgctctagacaaaactgagaatcttggtcttcatgctacagcattaaggaacaccatactaataatccctttttctggggtagtattgttagcactgaaatgtgtatcattcattccctcactaagtcatttcagaaacacttagcacctgctataygtcaakgtctggtttgcaaagataaagagttgtgatgatgatcctatggtgtttggagatatagacacataaaaatttcaatgatttcttacagtggggtaaggataagggatagaggttgcataaacaataatccaggctgggggctggtatggcaataagtgattatcagaacaatgctctgagataagcattattaacctcactttacaggaaagggaggtgaggaaccaagagtttagagtacccgaagttccacatctggttagtgaacttgaaaattttctgtagaatttatttaaagtgtatgtttcctgcgtcctcactttgatctagaaaatcaaaatctgtttttttttttaacaaacatctcagtaattacgccaacatgtgaatatcactgcctcctttcttcctttcagaatatggcccagttttctgttttattaccaagacattaaagtagcatggctgcccaggagaaaagaagacattctaattccagtcattttgggaattcctgcttaacttgaaaaaaatatgggaaagacatgcagctttcatgcccttgcctatcaaagagtatgttgtaagaaagacaagacattgtgtgtattagagactcctgaatgatttagacaacttcaaaatacagaagaaaagcaaatgactagtaaacatgtgggaaaaaatattacattttaagggggaaaaaaaaamccaccattctcttctccccctattaaatttgcaacaataaagggtggagggtaatctctactttcctatactgccaaagaatgtgaggaagaaatgggactctttggttatttattgatgcgactgtaaattggtacagtatttctggagggcaatttggtaaaatgcatcaaaagacttaaaaatacggacgtmctttgtgctgggaactctacatctagcaatttctctttaaaaccatatcagagatgcatacaaagaattatatataaagaarggtgtttaataatgatagttataataataaataattgaaacaatctgaatcccttgcaattggaggtaaattatgtcttagttataattagattgtgaatcagccaactgaaaatcctttttgcatatttcaatgtcctaaaaagacacggttgctctatatatgaagtgaaaaaaggatatggtagcattttatagtactagttttgctttaaaatgctatgtaaatatacaaaaaaactagaaagaaatatatataaccttgttattgtatttgggggagggatactgggataatttttattttctttgaatctttctgtgtcttcacatttttctacagtgaatwtaatcaaatagtaaagttgytgtaaaaataaaagtggatttagaaagatccagttcttgaaaacactgtttctggtaatgaagcagaatttaagttggtaatattaaggtgaatgtcatttaagggagttacatctttattctgctaaagaagaggatcattgatttctgtacagtcagaacagtacttgggtktgcaacagctttctgagaaaagctaggtgtwtaatagtttaactgaaagtttaactatttaaaagactaaatgcacattttatggtatctgatattttaaaaagtaatgtkwgmttctcctttttatgagttaaattattttatacgagttggtaatttttgctttttaataaagtggaagcttgcttttttaactctttttttattgttattttatagaaatgctttttgttggccgggcacagttgctcatccatgtaatcccagcactgtgggaggccgagacgggtggatcacaaggtcaggagatcgagaccatcctggctaatgcgttgaaactccgtctctactaaaaatacaaaaaattagctgggcgtggtggtgggcacctgtagtcccagctactcaggaggctgaggcaggagaatggtgtgaacctgggaggtggagcttgcagtgagcagagcttgcagtgagacgagcttgtgccactgcactccagcctgggcaacagagtaagactcagtctcaaaaaaaaaaaaaagagtgaaatgctttttgtttgcttcagttttttatcatggggagatctttttcctcagaattgttttcttttcactgtaggctattacaggatacttcaggatcaagatacagaaccttttatttaaagagtttgtaaagtcaatgtgtttgtttgtgtctctgagattgacttcaagataataagctgctaattgtaaacaaaacagttaccctccagtattaatatgactcattagtgtgagccatttgggtcaagtatgattatgacccttggacttcctgatgtagtattaaatttcaactctggttatccattagcaatctgtagagaacttaatgaacctgaacccaggcttctctagctctggtaacgtgtgattgttttcactacaatatgatacatagatggtaccttacttttcctcattcttaataggtgtctaagaatgtcagggcaaaagtatgggcatttttcttgctatgttcagaaagtacagttctctccaacttgcagaggtacttttcttgattaaatagccttctctagcaacatcattttcagactaactaaatgaatgcagtatactcttttctttgttctcaatcattcactccttatgcaaagccaatataattttcctcataccttatgcttgaggatattgttgaagaacacttcctggaacacttctcacttgtgatgctgtactaattttttttttttaatttaagctagtatactaagtgaacaccatggtcagttgtgagcattttggtttccgcaaaggatggatggtgagcatcatgggaaagctgtagtttagtgacttagcccttagtgattaatagatttgcatgtacatagaagtctttgttggccttataatctgctgttatrtttggcatggattttcatggttttgagaatgacatcctggccctgtggtccccgagggtcatggtccttgtgacctggcccctgttcactgcccccttcgctagcacgagttgctgtgcagggctggaggtagctaccatggcttgtttcaaggaaggaaactctggtacggtggcaccctcaggagtggaggacagtgaacttccttgaagagggagtgactaaggtgacctccaacctgccctgagccagctgccctgcaggtgccacgtgagcctgctctggcatccacaggatgctcctggagcctcttctctggctgctacctcagggcatggttgtggccccaccaacacctattttccaaataattattcattcttgtgacagtggcctgaacatgtttttaattttctcaacaagcatttagccagcacttatccagtgaaacaatttgataaggtttcaaggagtatctgatgggttaggaagtcacgaaatgaggagttcttgccacatttgcagagtccctccttgataaggtttggcggtgtccccacccaaatctcaygttgaattgtagttcccataatccccacatgttgtgggagggacccagtgggaggtaattaaatcatgggggtggttacccccacactgctgttctcatgatactgagttctcacaagtcctgtttgttttataaggggcttttcccccttttgctcaacacttcttcctgccatcatgtgaagaaggacgtgtttgtttccccttctgccacgattgtaagtttcctgaggccttcccagctatgtggaactgtgagttaattaaacctctttcctttataaattacccagtcatgggcagtcctttacagcagcatgagaatggactaatacactcctcaaatgttttgaagattgttgcaccttggaactaccagtgtgcacacaatctggctcaatgtatatattggcccagcaaggcaaagaactgaagttccaggatggaagaacctgtgttctcctcataatagtatagaataattcaagataggcaagaaggacagcagtaaatgaagaccatggaagaaaagaaggaatgccaaagatcgaggaaatctaccaagactagtagggtagtccagaagaagctgtttcagggcctgttgccagctatgcctttgagaacctcgggatcccaaagaatgaggggaatttcttcagaaagacaatctcggcatgcattatttctttgttttgaagattcactcatgttgcatgcatctgtagcttgtgccttttttattgcctagtagtattctgtcatatgcctatcttacaatttgattatctattcacctgttgatgaatgtttgaattttttccatttgaggaattttatgaataaagctgctataagcatgaaattacaagtctttttgtgaacatattttcacttgtgcaaatgcctatactcccaccagtaatttgtaagaattcttgacaaagcttggtattgtcagcgtttttaattttagccattctattgggtatattttgatatctcgtggttttgatttgcatttttctgattaaagatgttgaacttcttttcatgtgcttattggccattcacatatttcgtgaactatctgtacaaatatttttgtttattaaaaaattagattgttttgttttattattgaatagtaagaattgtttatatattctggatacactctttttcagatatgtgtgttgtgactattsttagtctttagcttgccttttcattttcttaattatgtctttcaaagaacaagtttttcattttgacgaagcctagtttatcaattttttttatggttggtgctttttgtgtgttccaagaaatctttgcctactcatttaattacctgtgtgcccttgtcaaaatcatttaattttgactactcayttaattaccttgcctactcatttaattacctgtgtgcccttgtcaaaatttactgtttatctgtgaatctggatgatctatttatgtcatttatctatgtgtctcttcttatgccagtaccccactgtcttgattattgtggctttatggtgtcttgaaattaagtattgttaagctttgcaatcttttccaagattgttttggctataggtcctttctttataaagtttatattaagcttctccatttttctttaagaaaaaatctgctggaatggcactgaatttttaggtcgatttgggaagaattgacaatattgaacctttcaatcgatggacatggtatgtttctgcatttatttgggccttttaaaatttatctcagcaatattttgtagttttagtgaagaagtcttgtatatatcttttgttaaatgtattcctaaatattttgtggaaatgttactgtaaatagtactttaatttcatttttaagtttattgctggtatacagaaatatgttttatttttgtatattgactttatattctgtaatcttattaaattcacttagttcagtagtagttcttatttttattttattgcaagtgccttagggataccttgtgtacacaatcatgtcatatatgaataacaacagtttaccttttgtttcttcttgctttgtcgtaatggctaggaccttcaacctaatgttgaatagaagcggtgtgtgagttgttactcttgtcttattctcaacagcagaggatagcgtctagtttttcactattaaaatatgttagctataggttttttccgtttcatgtttttatcagattgaagatcccttttattcctattttgccaagagtgtcatgaatgcatgttgaatttcaccaagtactttttcctgcatctgttgagagaatcttgacttttctcttttattttgttaatgtagattctttaatgttaaactgatcttgcattcctgatataaaccatacttagtcatgatatgttatcccctttatataatgctggattcggtttgcaaatattttgtttgatttttgcatctatgctcatgagacagattggtctgtgattttcctttcttgtaagtcttgtcaggtgtcagggcttggttaattttgacacatttacaaacatatatttttaagataaaaataaacttcaaaaaaaaaaagatgacgacagcctgagttgtttatatacagaatttgttaaccaaaaagattgaaaaaggctggaacagcaggttacatttgatacctgaaaatattttgcagctataaatgcatcttggaactgttataggcaaaagcttgggaatggctaaaattctcagtgtcataggatgttttaaataaactaaggtacatcaattcaaataagtaatgtgcagttgtcaaaaagaatagatatctgtttatgcaccagtatggaacaatgttcatgacaaaaggggaaatcaaaaatacatagagtaaaataagtttgtggtgatgtatagataggatgtttatacttcatatttccagaaaggttctggaaagaaacttattgatggcttctgagggatgaatcaagagacttaaactgtctacttcatacctttctatagtggttgaatttttcaccacaggcaactgttcctttaattgatatattttaaggaatggatactagaggagacctagcttcatagcagtttatgtaacatgagataaaatatatgattcttggcattaacttctgataggttgtgcttggggcactatatccagttctgggcacaatgctttcaggaggatgactatctaaaaagcaccaagagaagagtgaagggactgaaaaaaccatgccacatatgtaatacttaaatgggttaagtatatctaactacttaggagaaagccttcaatgagaactttgtttaggggctgtcattctcttacagacatgtgcctccctcactgttctgtaagcttttgtaaaggcaggagttgtttttttaactcatcagtttaggagcctcttttccttgtatttagcacaaactcaacaaatatttgtgtaaataaaaatctgattacgtttctttcctacttaaaacccttcatcagctctcccaaacacctccccatgttcactttcagcaggtgactttagttccctcttcacagacagaactgaagcatcagcagaacactttcaagacccccctctgytgctctctcccaaactgttttccctcctgttaccatctgtgatagtgcttctcaaacgggagcacgcatcgtcatcacctggagggcttattaaaacaggttgcatggcaccaccccagagtttccgattcaggatatctggagcatggcctgataatttgcatttccaacaagttcccagatgatgctggtcccactttgagaactactgtcatagatgtttctccctgatcattgtcttatgcaccagaccccatacctcacacctagtaaggacatcagtctagtaactacccatttcataatcatttttctccttatkattgaatcactttttcagcacacaaatatactttatttctcccattaaaattcttgaccccaattctatgtgctggctcatttttaagcttttcattggcataaaatccctcgagttattgtttctcctgcctccaattcctcttctccagtctttccttagtcctcttcatttcagattttgccagtgcaccatcttcagcaccaacaagattctcaaggtcaccgatttactgcatgtcaattttcacacttaacccttagtttcctatcagccgcatttgatacacttgaccccttcctcctctttgataagttttctttacttggcttccaaggacaccacactcttgattttcttccttcattgatggttgctgcttcttagtctcctttgctgatttcttgccttctccctgatcttttaatgttgcctgccctagagctcaatccttggatttctccatcttcacttgttccttggtggtcactcctcaacttcccctacacctgctttcccatcccagtctagcagttccatccttctagttcctcagactaaaaacttgaagtccttgactcttctcttcaaaacccacattaaaaccaggaaaaatttatttaccatccaaatatgtcaagatactgactattcctcattacagctactgcttccaacctagtctgagccactctcatctcacctggatactgtaataacccctaacaggtcctgtgtctacttttgttccctagagcaagcaacccaggaggcagaatgatctgtacaaaatgctatttcacttgtattaaaatcccacatttatgatagcctatgaatccccatgtgatttgcacttgccctcctatctctctgacttcctctcactactgtcctcttgctcactctgctccagcccttttccaagaacacaccaggccccctcctgcctttaacattagagtatttggtttgtgttccttctacctggaacactctcccagcagataaccacctggcctcactacagcagctccttcagatctttgctccaaaatcaccttagtgggtcaaccccaaacatcgtattttaacagatgataatgcccttcactccatgcccaaagtactcctaaggactcttacaagcacagcttttttgtttttcccatagctcttaacttctccctacttactctagtatttgtatatatttgtttattgttttgtaactcccaacacacacacttcctccaaaatgtacaacctctgtgacagcaggaaacttgtcatttactgatatcctaaatgaccagactagtgcttgggatttagtaggcttccagccaatactatcttgaatgtacagcttcccaatacatatggcttgcaaagccgtgtatgttctgacttactccagcctctttctcacctcccacacctcatggcactctaaatcagtgctgtctgatagaaatatgtgagccaatatgtaattttaaattttctaggagccacatttacaaagtaaaaaacagttgaaattatttataatatattttaatataatatatccaaaatgttatggagatgtaacatttaaaaattatgaaatttttattcttcaaatactaaatctttgggatcagatattttatactaacagtacatctcaattcagaggttaaatttttttttcttttttttttttttttgagatggattctctgtctcccaggctggagtgcagtggcatgatctcggctcactgcaacctctacctcccaggttcaagcaattctgcctcagcctcccaagtagctgggattacaggtgcctgccaccatgcccagctaatttttatattttcagtagagacagggtttcaccatgttggccaggctggtctcaaactcctgacctgaagtgatccaccagcctcggccttacaaagtgctaggatcacagccrtcagccaccatgcctggctgtgaggctaaatttttataagaaatgttctatctgtgtttaaattttgtaaaatttactttgaaaaaatagactcacatacctaagttgttccagtgattttgaagcggctgtcaacttttaaatttaacttaattaaaactaaataaaattaatttcatttgctcagttgcactagctacattttaagtgttcagcagccacacttggctagtgatgtattagcacaactctttgaccccagctccaagcagaccaggctcctccttgtctctggccttttgtaagttgtccctccacttggaagactcttctttgctccaccatcatctctttttatctgactcactgtctgaattagccctttctctgcactttgcaaacaccctattctgttacattactagtcacactgtattataattgtctgattcattgtgtgatggttcaggaattatttctaccttgtttacttctgtgtccccagactcttcggacattacctttcatataagagatactgtgtatgtctatatatacatatatgtatttgttaaataaatttataaatctatgaaatttatgcctatagaagttttagccatccttcggtttccacctcaaatcccttcttcccaggattcttgtcagagcagtccacagcaaatatttcctgttttgtactcccaaaccacctgcagctcatattactcataggccatttgtaatacatgattttactacgtaaaattctacctccccagatagtgaaaactggaagagcaggaattctggaaaagaaaatgacttacatattaggtgttcaataaaaacttgatgacttattaaatatattgtctgatttcagtcttatgtctggtgattacttttcctgaggtaattcagtaaaaccagtgaaaatttttgtgtgttttaaccattatgctaaaaggtatctgctctctgccaggcgtggtggctcacacctgtaatcccagcactttgggaggctgaggctagatcacttgaggtcaggagttgaacaccagcctggccaacatggcaaaacctcatctctactaaaaatacaaaaattaaacaggcatgatggtaggcacctgtaatcccagctactcaggaggctgagctyagcaggaaaatagcttgaacccagaaggcgggaggttgcagtgagccaagattgcgccactgcactccagcctgggcaatagagaaaaactccatctcaaaacaaacaaccaccaaaaactgtctgctctcaatcttttgattgaatagtaaaaccaatattttttttaaaggaaggctacttcccgaatgaccttatctacctatgtgtctgtgtagttggccattaatcaaatgtcatttatatcccaaacttcattttcattcattgttgattcggttgatactcatgtccatctgtctacagatatacactgtcactcatcagtgttatatacaaaccttactcattttattatcactaatgggctcaatcctaaataagatcaaagcttatttttcccttttgcatagtatcttccaatagtcaagctaaagaagaaaaaagcaaattgcattatgaaaatgctatactacacagtctgttctgtgaggtgtagagcaagcattaatgaccctttttttctgtgccagattggaggagaaaagagagaagtagaaacaattaactgtagacagatcagacctttcaactttttcatgctttatgactgcagtcctaatgataaagaaccccagaggcaatgtgagcactccctcgggagggaatgtgagtctggtatctggtcctctctaacagttcatgcctggtaaggatcatggtgtcctggcatgacagacaccaaaagtccacattttccaagggaatgaatgtttacaaatacattggttccttgatgttactagagccctcttcctattctctcctcttttcctaattcatgcccccttattaccttaacagaggtgggagttaatcaggatgtaataaaattgaaaaagtacctaggatggaagggatttggaattctgaatattgtgttttaagttggaaaaaaaagttacataaaatgtattctattgtcttggcagttatttactttgttttttatcttatagtttgtcttcttgagactgtaggcgtctataaactgtgaactaatttagatgccactcctgagggcctggcacatgatttgcacttaatgaacagctgctttggtctgaatttctgtgtcctcctaaaatccatatattgaaatctaatctccaatgcagtagtatcaagaggtagagcctttgggggtgattaggtcatgatagtgtttccttcatgaatgagattagtttctctataaataaggcccgagggagctcttttgccccttctgccatgtgagaacacgtctagaaggtggcatctatgaagtagagtgggccctcatcagacactgaatctgttggtgccttgatcttggacttccacccccgccccccaccccaagaactgtgagaaacaactttattgtttttaagttactcagtctaagatactttgttatagccacccaaaaggactaagacagcagccactaaaaagtgttcattttacctcaatcagcaatttaaaaggaacagctatagaagttgaacaacagtcgtactaaatggttcctaaggaagttatttttgaaaaagtataaatatcaacatgaaaaggtttcagaattcagtgtataagtgaaaaaaggacatgttcttggtttaataatcattttgttgcagagcacttttttcggaataaaaaaaatttgattatttcatttagggaagattaacaggaaatagtgttatcaaactgtgccctcagttttatagatgactcagtcttaaaaactccacacatcggaatgtgatgatgtgttcattagctgctctgtttgacctcactttagtttacgaattcccaccctttaggaatcaagattacaaggctaaagcagtaagtaataggaaagtcaacttcaaatatatacagaaatacaaagatcaatataatgaacccctgtctgccacccggcttcaagaattacttcatagacaatctgtttattctataatcccactgactgttcacctccgacgttattttgaagcatttctcatgtatgatttcatctatgaatatttccatgataagaataaaaatttcttaatgtcagaaaatatttagtgactattcaaaatttcaaatgtgttataaatgccatgttttacatgttgtttatttaaatcaggatccaagtaaagtctatacattgcaattggttaatacatattttgtgtttcttttattttaggccatctcttttagtaaatgtccttgaatgtttcttaagttgctgtatgttcatggaccatttccagagactttrattggttgttttaaaataattttcacccattctgtaggttgcctgttaatgctgatggtagtttcttccgctgtgcagaaaagaactctggactcagttcccagaaaaactagtgaaaattatttttttaatcatttttctttttttttttttttaattatactttaagtgctgggatacatgtgcagaacatgcaggtttgttacggaggtatacatgtgccgtggtagtttgctgtaaccatcaacccgtcatctacattaggtatttttcctaatgctatccctcccctagcccacaccctgacaggccccggtatgtgatgttcccctccctgtgtccatgtgttcttattgttcaactcccacttatgagtgagaacatgcagtgtttggttttctattggaatgatggtttccagcttcatccatgtccctgcaaaggacatgaactcatccttttttatggctgcatggtattccatggtgtatatgtgccacattttctttatccagtctgtcattggatgggcatttgggctggttccaagtctttactcttgtgaatagtgccgcaataaacatagtgtgcatgtgtctttatagtagaatgatttataatcctttgggtatatgcccagtaatgggattgctgggtcaaatggtatttctagttctagatccttgaggaatcaccacactgtattgtttcctgactttttaatgatcgccattctaactggtgtgagatggtatctcatggtggttttgattagcatttctctaatgaccagtgatgttgagctttttttcatgtttgttgactgcataaatgtcttcttttgagaagtgtctgttcatatccttcgcccactttttgatggggtggtttgtttcttctaaatttgtttaagttccttgtagattctggatattagccctttgtcaggtgggtagattgcaaaaattggttattttctctgctcctcaccctcctcccacccttaaccctcaagttggccccagtgtcttctttgtgtctgtgagttcttatcatctagctcccacttataagtgaaaacgtgtggtatttggttttctgtttctgtgttactttactaaggataatggcatccagctccatctatgttccaacaaaagatatggtctccttcttttcagtggctgcatagtattccatggtacatatgtaccacattttctttgtccagtctgtcattggtgggcatttaggttgattccatgtctttgctgttgtgagtagtgctgtatgtgtctttatggtagattgatgtatgttcctctgggtatatacctagtaatgagattgctgggtcaaatggtagttctatttttagctctttgaggaatccccacaccgcttcccacaatggttaaactaatttccactcccaccagtatcagtgttcccttttctccacaacctcgtcagcatctgttatttttttactttttaataatagccattctgactgctgtgaaatggtgtctcattgtggttttgatttgcatttctcgaatgatcagtgatatcacgcttttttaaagtatgattgttggccacatgtatgtcttctttagaaaagtgcctgttcatatcctttgcccacttttaaatggggtttttttttcttgtaaatttgtttaagttccttatagatgctgtatattagatgtttgtcaaatgcatagtttgcaaatattttctcccattctataggttgtctgtttactctgttgatagtttcttttgctgtgcagaagctcttaagtttaattagatcacccttgtcaatttttgcttttgttgtgatagcttttggtatctttgtcatgaaatatttgctcatttctatgtccaggatggtattgcctaggttgtcttccagggattttatagtttggagttatacatttaagtctttaatccatcttgagttgatttttgtatatggtataagaaaggggtccagcttcaatcctatgcatatgactaaccagttatcccaacaccatttattgaatagggaatcttttccccattgcttgtttttgtcagctttgtcaaagatcagttatagatgtgcagccttatttctgggctctctattcggttccattggtctatgtatccttttttctaccagtactatgctgttttggttactgcagtttggattatagttcgaagttgggcaacgtgatgcctccagctttgttctctttgcgtaggattgccttggctatttgggctctttttttggttccatgtgaattaaaaaaaaaaatttctgtgaagaattgtcattggtagtttgataggaatagcattcgacctataaattgctttgggtagtgtggtcattttaatgatactgattcttcctgttcgtgagcatggaatacttttccatttgtttctgtcatctctgatttccttgagcattgttttgtaattctccttgtggaaatctttcactttcctgattacctgtattcctaggtattttattcttcttgtggcagttgtgaatgggattgcattcctgatttggctctctgcttgactgtcattggtgtrtaggaatgctagtaatttttgtacattgattttgtatcctgaaattttgctgaagttgtttatgtggtgaaggagattttgggctgagactggggttttctatatagataatcatgtcatgtgcaaacagggatagtttgacttcctctcttcctatttagatgctctctatttcttgctcttgcctgattgctccagccaggacatccaatgcaatgttgaataggagtggtaagagagggcattcttgtcttgtgctggttttcaaggggagtgcttccagctattccccatccggtatgatattggctttggatttgtcatagacggctcttattattttgaggtatgttccttcaatacctagttgattgagagtttttaacatgaagtgatgttcaattttatcaaaagccttttctgcatctattgaagtaatagtgtgggttttatctttacttctgttaatgtgctgaatcacatttattgatttacatatgttgaaccaaccttgcatcccaataataaaaccaacttgattatggtggataagctttttgaagtgctgttggattcgatttgctagtattttgttgaggatttttgtatcaatgttcatcaaagatatttgcctgaagttttcttattttgttgtgtctctgccagactttgttattaggatgatactggcctcatagaatgagttggggaggagtccctcctcctcagtttttggaatagttttagtaggactggtaccagcttttacttacacatcaggtataatttggctgtgaatctgtctagacatgagctttttatggttggaaggccttttaatactgcttcaatttcagaactcattattgttctgttcagagatttaatttattcctggttcagtcttgggaggtgtatgtttccaggaaattatccatttcttctgtttcctagttgtgttcataggggtgtttatagaatctttgaggttttctttttatatttctgtggggtcattggtaatgtctcctttgtcatttctgattgtgtttatttggatattctctgtttttctttattggtttagctagtggtttatcaatctgagttattcttttaaagaaaaaatttctggatatgttgatggtttgtatgttctttcatgtctcaattttgttcagtttagctctgattttggtaatttcttgttttctgttagctttggggttggtttgcttttgtttttctggttcctctagttgtaattttaggtggttaatttgagatctttctaacttttaaaatttttattctatttatttatttagagaccaggttatgagactggctaatttttgtattttgggtagaggcagggattcaccatgtttcccaggcttatctccaactcctgggctcaagtgatccacctgccttggcctcccaaagtgctgggattacaggcatgagccactgcacccagccaagatcttgctaaatttttaatgtgggtgtttagtgccataaactgtcctgttaatgctgttttgtgtgttccagaaattttagcaagttgtatctctgttctcattagtttcaaggaacttcttgatttctgccttaatttcattatttacccaaaagtcattcaggagcaggttgtttaatttctatgtaattgcatggttttgagcaatttttaaaatcttgacttatatttttattgcgctatagtcctagagtatgtttcatattattttggttcttccgcatttgctgaggattgttttatgtccaattatgtggtcaattttagagtatttgccatgtggcagtgagaagaatgtatattctcttgggttagggtggagagttctgtagaggtctattagatccatttggtccaatgttgagttcaggtcctgaatatgtttgttaattttcttccttgatgttctaatactgtcagtggagtgctgaagtctctcgctagtattgtgtgggagtctaagtttatttgttggtctctaagaacttgctttatgaatctaggtgctcctgtgttgggtgcatatatatttagtatatttaggcttcttgttgaattgaaccctttaccattatataatgcccttctttatctttttctatctttattggtttaaagtctgttttgtctgaaattaggattgcaacccctgcttttttctgatttccatttgcttggtatattttccgccatccctttattttgagcttatgggtgtcattacatgtgagatggatctcttgaagacagcatgccactgaatcttgttttttttatccagcttgccactctgtgccttttaagtggggcatttagcttgtttacattcaaggttagtatcaatatgtgtggatttgatcctgtcattgtgttgttaactggttactatgctggcttgtgtgactgctttatagtgtcattggtacttaaatgtgtttttgtaatggtctttcttttctaaatatagtgctcctttcaagatctcttacaaggcagatctgttggtaacaaactccctcaacatttgcttatctgtaaagtatcttatttctcctttgcttaggaagcttagttcggctggatatgaaattctcagtggaagattttttttcttcatgaatgttgaatataggcccccaatcccttctggcttgtaggatttcatctgagaggtccactgttaacctgatggggctccttttgtaggcggcctgccctttctctctggcttcctttaacattctttcttttatttcagtcatggaaaatctaaggattatgtgtcttcacgatgatcttttgtaaaatcttgcaagagttctgtgtattccaacaaattccatttgttggaaacttaatttctaaatttatatattgatggcatttggaggtggagcttttagaaagtaattaggattagatgaagtcatcaaggtggatcccccgtaaaggaataagtgacttcataagaagagtaagagagctaagttagcacacttgttctgtctcaccatgtgatgccttttgccatatcattttacaagaaggccctcaccagatgccagtgccatactcttggacttcccagcctccaaacccataaactaaacctctattcattatagataatccagtttatggtatttagttacagcaacagaaaatgggctaagacaacaattaggcaggaaaaagaaataaaagccatctagattggaaaggaagtaaaactatttctaattcccagacaacataatcttatacagtatttacaaaatcctgtagattccactaaacgacaactagaactaataaacaagctcagcaaggttgtaagatacaacatttatatacaaaactcaactgtattctcatacatttccaatgaacaatccaaaatcaaattataaatataatcctattataaatattataaaaaggaatacaatacttaggaataaacttaacaaaataactgcaaaacatactctgcttgtccactgcaaactacaaaacattgctgaaagaaataagacacaaataaatggaaagacattttatgttcatacactggaagacttaatattgttaagatgtcagtactacccaaagtgatctaacagactcaacacaatccctataaaaatctcaatggcatttttttkgcagaaacataaaaattcactctaaaatttccatgaaatctcaaaggaccccccagtagccaaaacaatcttgaaaaagaaagacattggaagtctgacaatgcctgatttcaaaatatattacaaaactatagtaatcaaaacagtgtggtactggcataaagacagacatattgacaaatggaaaggaatagagagccctgaaataaatccttttatatatagtcaaatgatcttcaacaagggtgccaaaatcactcaacaggcaaaagacagtttctttaacaaatgctattgtgaaaactggatatgcaaatgcaaaagaatgaagttggactcttaccaccatacacaaaaattaactcaaaatggattaataacttaaacacaagaccaacaaccatgaaagcactagaaggaagaaaacatacaggggaaagatttatgayattaaatttagcattatttttgtggatatgacatcaaaagcacaggcaacaaaagccaaaatagacaaatggaactagatcaaactttaaaacttctgtgcatcaaaggacacaatcaacattgtaaaagagcagcacttgcaaaccatatatctgatgaggggttaatatccagaatatgaaaagaactcttgtaatgccacaagaaataatccaattaaaaagtgggcagaagacttgaatagacattttttcaatgatgatagcaaataaccaataaacatgcattgctgcttgacatcagtaattattagagaaatagaaatcaaaaccacattgagatatcacttcacacccattacaatggctactatcaaaaaaaacagaaaatgttgccatagatgtggaaaaattggaacccttccacacttttattgggaatataatatgatgcagccactatggaaaacagtatggggttttctcaaaaattaaaaatagaaataccatatgattcagcaatcacatctttgcatatgtttctaaaagaattgaaagcaggatctcaaagaaatttgcacacccatattcatagcagcattattaagaagagccaagagatggatgttcatcaagagatggacagataaagaaaatgcaatttacatgcaaatgtagtataaaacaaaatattattcaaccttaagaagtatttccttcatttagcaacaggtatagcatgcaaatgtagtacaaaataaaatattcaaccttaaaaaggatttccttcctttttactgcaaatacaaatgcaaaagaatgaagttggactcatcaccatattaaaaaaattaaagtggattgaaaacttaaacacaagacgaacaactgtaaaggaaggaaaacctttttaaggttcgataatattttattttatactacgtttgcatgctacccctgttgctaaactgtgtacttaaaaattgttaggattaggtgagttttgctacaacctttaaaaagttttattctcaaaattgtaaaacattgttcacataaagaataaataaatagaaaaacatcctgtgtttattgatccgaagagttaatattagattgttaggatggcaatattcttgtaactgatctatgtattcaacacagaattaaatggagaaatttacaaaaactacagtcagcatgagatttctatttttctctcttacaaattgatgtgtcagacagagagcttaaggtttgatatggaaaatttgaacaacataattatcaaacttgattaagtaaacgttttatatgcaataatcagaaaatatctctatacattctttcaagaacacatggtacatttaccagaactgatgatgttttagaacaaattgtctcaataaattttaaagtaactctgggtttttatctaatcacaacacaaaattaatgtttaatagtaaaaaataattttaaaaattttatttggaagttataaagtacacttttaaataattcatatatcaaagaataaagtgtcactggaaattttggttttctgtcaaaccatgagatgcagccaaatatgttcagagggaaatttatagtttttaatgcttattttcaaaaagaaaaaaaattaagaagtgaggcccctaactcaagaagtgattaaaaaagaaaagcagaacttaattaaattaatgaagtagaaaacaaggaggatacatttaaaaataacttacagaacaggagaagatatatgcaatacttataactgaaaaaaaaaacaaaaactggtgtccagaatatccaaaaacaccctaacaaatcactgacaaaaaggcaaacaatcaattagaaaagggagtaaaagatttaaatagttcaacaaaagagaaactctgcatggtgaatcactatatgaataaatgctcaaccttcttagtgataagagaaatgaaaatttaaaacaccacaatgagatacctctacaccccatcagttgaacaaaaaattaagtatgacaactccaagtttgggcaaagatgtggagcatcaagagttctcatacagtgctagtgagagcataaattgatagaaccacatggagaaaataatgtgacattatccaactaaattgaagataagcctactgtagcagtctggatccaatcaggagatagaaaccccacaatagcctaaacatggaactttaatatcagacttaatacctatgattaaatagcaactataaaatatgaggaaagagtacctaaggaaagacaaacgtgaaagagtttcagatctcattggagaacgtgtgtttggccactagatagcaaaaaaaaaatctgctgatgtagccagaccacaggtggtctggagtttctgagcaaacaatagggaaccctctagtgtacaggtagggaagcaggcaatcagcaatacctagtgtggcctgcaataggaagctggggatgaaagcagaagaccagagcatacccatacacactagcccgcacaggaagtggcagctctgtgttgtgagcctctgtgccacagggggctgttgtgaaggtcatgtgggagctttggtttttatgtccagagggctgtgaagctgcaatattgcagagtaatctcaggccttggtggtttctagtggatgtcgtcacatccacacctctgaaaaaattgcaagaagtttctttatcctgcaatgtcccttcaacatcctcactgaaaaaaagttaacataatgctcactttaaaagagaagtacttgagagaattctattattagttgtagaccatatattgcagggtacatttagagctgaaaagtgatcaattgctaatggaaataccctgtaatttgaaatgcatgaatttgtgttggatacaccaacacatatataaaaacggtcatagacgttttgttttaattgccccaaatggacacaacacaatgctcagaatggataaatgattgtggtatacttatatgatggaataataacatcaattaaaatcaacaaagtagagcttgtgcaacaatatggctgaacctttcaaacataatgttaagtggaaaaaagcaagacactgtataatacaaattacatatcttagtcaattcaagctattgtaaaaatactatagactggatgccttaaacaacaaacatttatttctcacagttctaaaggctgggaagtgcaagataaagtattggcagatgtggtatgtagtggagccccactttttggcttgtagacttcttgctgtagcctcacatggccgctagtgaactctagtttctttctcttcttataaggacactaatcccatcatgggggctccacttccatgacctcatctaaaccttgtgacctcccaaagttcccacctttgaataccatctcattgagggttagggtttcaacatatgaactttggggagacagaaaccatgtagtctataaaattgcatgattccctttatatcaagtccccaactaggcaaaactaaactatattattcaaggttgcatacacaattagtaaaactgtagagaagtaaggaaaccactaccataaaattcaggattttactaacctttagaagggagggaaagggttatgatagagaaagaatatatggtgggaagggctttcagggtaccggaactatctcaatgtgatgatagttaagctgatgtttgctttatcaatgcttatttatgattcatactttatatataaattttatgtgcttttctgtctatatgtgttacatcttttaagaagaaaaacagtttatgccaggaaacaacaaaatccagccatgcccacccagagattttataggcaaagtatatcatacattgatggaaggaataatcctaatttatgcaattatttccaaagaatactttggagaaagctcttctttgaatcatgtatactccaatatatttgttcttaagaggttgggcaggattactataacctaaaggttctgggcaccatcccccaagattctgattcagtaggtctggggtggggcccaataatttgcatttttttttatttcaatagtttttggggaacaggtgttgttacctgaggatggtctttagtgttgatttccaaaattttggtacacccatcacccaagcagtgtacactgtacccaatatctagtcttttatccctcacccacctcccaccctgccccagtgagtccccaaaattcattatatcattcttgtggctttgcatcctcgtggcttagctctaagtgagagcatatgatgtttggttttctgttccttagttacttcacttataataatggtccccaaatccatccaggttgctgcaaatgccattatttcattcctttttatagctgggtagtattacatggtgtgtgtgtgtgtgtgtgtgtgtgtgtgtgtgtgtgkatacagatcacattttcttcatccactcgttgaatgatgggaatttgagctggttccatatttttgcagttgtgaattgtcctgctataaacatgcctatgcaagtgtctttttcatataatgacttcttttcctctgggtagacatagatacccagtcatgggattgctggatcaaatggtagatgtccttttagtttttttaaggaatctccacactgttttccacagtggttgtactagtttacatgcccaccagcaatgtaaaagtgttctctttcaccacatcaaggccaacatcttttttttttttttaattatggccatccttgcaggattaaggtcgtatcacgttgtggttttgacttgcatttccctgataattaacaatattgagcattttttcatgtttgttggccatttgtatatcttgttttcagaattttctattcatatccttagcccacattttgatgggattgttttattcttgctgatttgtttcagttccttgtggattctggatattagtcttttgtcagatgcatagtttttgaagattttcttccactctgtgggttgtctgtttactctgctgattatttcttttgctgtgcggaaccttttttattttgttaagtaccatctatttatctttgcttttgttgcatttgcttttgggttcttcgtcatgaactttttacctaagccaatgtctagaagggtttttctgatgttatcttccagaatttttatggtttcaggtctttggtccatcttgagttgacttttgcataaagtgagaggtgaggatccagtttcattcttctatgtggcttgctaattatccagcaccatttgttgaatagggtgtcctttccccactttatgtttctgtttgctttgtcaaagattagttggatataagtattggactttatttctggrtactctattctgttccgttggcgtatgtgtgcctgtttttataccagtaccatgctgttttggtcaccatagccttatagaatagtttgaagttggataatatgataccttcagatttgttcttttcgcttagtcttgctttggctatgtgggctatttcatagttccatttgaattttaggattgttttttctagttctgtgaagaatgatggtggtatattgataggaattgcaatgaatttgtgcattgcttttggcagtatggtcattttcacaatattggttttccctatccatgaacatgggatgtgttttcatttgtttgtgtgatctatgatttcttttttattattattatactttaaattttagggtacatgtgcacaacgtgcccgtttgttacatatgtatacatgtgccatgttggtgtgctgcacccattaactcatcatttaacattaggtatatctcctaatgctatccttcccctctccccccaccccataataggccccgatgtgtgatgttccccttcctgtgtccatgtgttctcatggttcaattcccacctatgagtgagaacatgtggtgtttggttttctgcccttccaatagtttgctgagaatgatggtttccagcttcatccatgtccctacaaaggacatgaactcatcattttttatggctgcatagtattccatggtgtatatgtgccacattttcttaatccagtctatcattgttggacatttgggttggttccaagtctttgctattgtgaatagtgccgcagtaaacatacatgtgcatgtgtctttatagcagcatgatttataatcctttgggtatatacccagtaatgggatggctgggtcaaatggtatttctagttctagatccctgaagaatcgccacactgacttccgcaatggttgaactagtttacagtcccaccaacagtgtaaaagtgttcctatttctccacatcctctccaacacctgttgtttcctgtgtgtcatctatgatttctttcagcagtgttttgtagttttccttgtagagagctttcacgtccttggttagatatatcctaagttttgtgtgggggggttgcagctattgtaaaagggtttgagttcttgatttgattctcagtttggtcactgttgggatatagcagtactactgatttgtgtacattgatattctatcctgaaactttactggattaatttgtcagatctaggagctttttggatcagtctttagggttttctatgtataccatcatatcatcagtgaaaagcaacaatcatttaggagcaggttatttaatttccatgtattttcatgcttttgaggattccttttggagttgatttccacttttattccactgtggtctgaaagagtacttgatataattttgattttcttaaatttgttgagatttgttttggggtgtgtcatatgctctatgttggagaatgttccatgtactggtgaatagaatgtgtattctacagttattgggtagaatgctctgtaaatatattaattccatttgttctagggtatagtttaagtctattgtttctttgttgacttttggtcttcataatcggtctagtgctgtcagtgaagtattgaaggccccactgttactgtgttgttgtctatctcatttcttaggtctagtagtaattgttttataaaattggaacctccagtgttaggcgtatatatattttggattatgatattttcctcttggactagtcttttatcattatataatgtccctcttggtctttttgaactgttgttggtttaaagtctgttttgtctgatataaaaatagctactcctgcttgttttggcatccatttgcatggaatatctttttccaccgctttaccttaagtttatgtcagtccctgtgtgttaggtgagtctcttgaagacttatttccctggctttgctagagatctagacattcaaatagaagttcaaagaacacccaggaaattcgtcgcaaaaagatcatcacctagacacatagtcatcaggttatctaaagtcaatatgatggaaataattttaagaactgtgaggcaaaagcatcatgtaatctataaaggaaaacctatcagattaacgcaaatttctcagcagaaaccctacaagctagaagagagtggggtcctatctttagcctccttaagcaaaataagttgtttgaatgtctagatctctagcaaagccagggaaattttctttgattatttcctcaaataaattttccaaacttagatttctcttccttctcaagaaaatcagttattcttaggtttggtcatttaacataatctcaaactttttgaattttgttcatttttaaaaatttttttttctttgtctttgtcagattgggttaattcaaaagccttgtcctcaagctctgcagttctttcttcyacttgtttgagcctattgttgaattgtttcatccatatcctrttttattcttttaacttctttaagttagttttcacttttctctgctaccttcttcagtagcttaataatcaatcttctgatttgttttctggaaactcagagatttcgwcttagtttggatccattgctggtgatctagtgtgatcttttgggggtgttatagcaccttgttttgtcatattaccagaattgtttctctgttttcttctcatttgggtagattatgtcagaggaaaggtctgggactaaagggctgctgttcagattctcttgtcccatggggtgttgtcccttgatatggtcctatccccccacttcccctagggatggggcttcctgagagccagactacagtgattgttattgttcttctgggtctagcctcccagcagagctaccaggctccaggctggtaccgaggagtgtctgcaaagagtcctgtgatgtgatctgtctttgggtttctcagccatggataccagcacctgcttcagtggaggtagcaggggagtgaagtggactctgtgaaggtccttggttgtatgtttgtttagtgcactggttttctctaatgctggttgtgctagtggttagttgacctttagccagaaggtggctctctcaagacagcattagctgatacaagcttgccctaaaattgcccatgtaactattcaggtttctcaggtgataggaaagaccatagagctcccaagagattatgtcttttgtcttcagctaccagggcaggtagagaaagaccatcaggtgggggcaggattaggtgtgtctgagctcagactctccttgggtggggcttgctgtggctgctgtgggggatggggtatggttcttaagccgatggagttatgttcccaggtggattatggctgcctctcctgcatcatataagtcacctggaagtgggggaaagctgatagtgaccagcctcacccagttcccacgcagccagcaaggccagtctcactcccaccaccagccccaagtttatattcaggcaaccagcaatcaccgctgagatcttgccccaggctacatgtctccttgctgagaattcaagcagggctttcaggcccagtcccttctcacctgccatggcttctgtgctcatatctgcacttctcattgatctctcacttctggattctgcccaggaaagttcatgattggtcaaaattattacagagttcaactggacgttttcttctctctgtggttctttccgaattccactggcagccctccccaaggacccttgtgagaaaaagtcagaaatggcttccctggggatcaggagtgtccacagggctcttactgctgcttcttctacctttacattttgctgggctctctaaattcatttcaactctaggtaaggttaaatccttcttctgtgatctgaattttcaggttccccagtgaggatgtgtgtttggagatggaccttccccctgacactttgggcactcccagttttttggctgtctcacagagcttgcagtggcaagctgtttccttcaaaaggtctgtgaattatttcagttttcctggtacattcttgtggtcgttcttggagcaaaagtttatgatgtaagcctccacatactgttctgttcgtccaagtgggagctgcaagttagtcctgctttgtagccacgattttccccaatattttgcatttctgatagttgccgtgagactttgatgttgctggtctaggaaccgtagtttgagaacaactgttctagcataattgaaagaaggttatctggccatagtcaaaccatcaagggaaccaacaaatataaaagcaaaaattcccaaccaaaaggcagtaagttcgaagattcaagaaacatcaagccacacagatgaaaaagaaccagaagaaaaacaatggaaattcaaaaagccaaagtgtcttcttacctcaaaatgaccacactagatcccttgcaatgtttcttaaccaggctgaaatggctgaaatgacaaacattgaattcagaatctggatggcaatgaatatcattgagattcaggagaaaggtgatacctactccaaggaatctaaggaatacagtaaaatgatacaagagctaaaagatcaaaatagccattttaagaaagaaacagacttatctgatagagctgaaaaactcactacaaaaattccataataccatcaggattaacagcagaataaaccaagctatggaaataaactcagagcttgaagaccagttcttcaaatcaactcagacaaaaataaaaaagaatgaacaaaacctccaagaaatgtggggttatataaagggaccaaacctatgaatgactgacatccctggcagaaagggagcaagagcaaggaacttgtaaaatatatttaatgagactgtgcacaaaagtttccccagccttgctagagaggcgaatattcaaatgcaggaaatttagagaaaccctgtaagatactatacaaaatgaccatccccaagacacatagttatcagattctccagcgtcaacacaaaagaaaaaaatactaaaagcagctagagagaataggaaggtcactgacaaagggacccccatcaggctaacaatggacctttcagcagaaacactgtaagccagaagagaatgtggcctatattcaacattcttaaagaaaagaaattttaaccaagaattttatccagccaaactaagcttcataagaaaacgagaaataaaatctttttcagaaaagcaaatgctaagggaatttgttaccatcagacttaccatacaagtcctaaaggaagtgctaaatgcagaatcaaaagactgttaccagccaccataaaaacacacttaagtatatagactgtttacattataaagcaactacacaatcaagtttgcatagccaccagctaacaatacaatgacaggaacaaatctgcacatagtaatattaaccttgagtataaatgggttaaatgccccacttaaaaggcacacagtggcaatttggataaagaagcaagactcaactctatgctatcttcaagatacccatctcatatgcagtgacacccataggctcaaaataaagggatggagaaaaatctaccaagcaaaggaaaaacagagagaagagtaggggttgctattcttatttcagacaaaacagaccttaaaccaacaatgataaaaaaagacaagggcattatataatgataaagggtttaattccacaggaagacttaattatcctaaatatatatgcagccaatactgaagcactcagatttataagacaagttcttaaagaccttgattccacaaagagacttagattcccacaaaataatagtgggacactaaaacaccccactgacagtgttagacagatcattgaggcagagaattaacaaagatattcaggacctaaacttgacacttgaacaaatggacctgacagacatctgcagcacactccacccaacaacaacagaatatacattcttctcatctgcacatggcatatagactaaaatgaaccacatcttgaccataaagcaattctcaacaaattcaaaaataaaatcataccaacctacactctcggaccacagtgcaatgaaaatagaaatcaatagtgaaaagatatttcaaaattatacaattacatggaaattaaacaaccttctccttaatggcttttggctaagcaatgaaattaaggcagaaatcaagaaattctttgaaaataatgaaaacaaaagtacaacataccagaatctctgggacatggtgaaagcagtgttaagaggaaaatgtacagtgctaaatgctgacattaaaattgccaatccaattacctccacctggtcctgcccttgacacatggggatcatggggattacaattcaaggtgaggtttgggtgggaacacagatccaaaccatatcagcactggtacaaaaacaaaaacacaaataatctcaaataaacaatctaacattataccaagaggatgtagaaaaacaagagcaaaccaacccaaaagatagaaggagaaaagaaataaccaaaatcagaacttaacaaagttaatgtgcaaaatacatacaattgttttcaaacatcaatgaaaccaaacgttggttttctgaaaaaataaataagattgaaagagtgcttgctagacttacaaaaaaagagagaagatctaaataaagacaatcggaaatgaccaaagggacattaccatcaaccccacagaaatataaaaaaccctcaaagactaaatgaacacttctgtgcacataaactagaaaacctagaaggaatggataaattctgggaaacgtacaacctctcaagattaaacctggaaaaaattgaaaccctgaacagaccattaatgagttccaaaattgaatcagtaacaaaaacctgtcaaacagaaaaagccttagattagatggattcacagctgaattctaccatatgtaaaaaacaaaaggtattaccaatcctactgaaactattcaaaaaaaaaaaaatcaaaggaggagggactcctctctaacttattctataaggctagcatcattctgatacacacacacacacacacacacacacagaaattctggccaacattcctggtgaacatgtatacaaaaatactcaacaaaatgctagcaaacgaaatccagcattgtatcaaaaagctaatccaccatgatcaagtagcctttattcttgttctgcaaggttggttcaatgtacacaaatcaataaatatgatttgtcacaaaagcaaagcaaaaaacaaataccacattatcatttcaataaatgcagaaaagacttttgataaaattcaacatcctttcatgttaaaaaaaaaaaaaaaaaaactaggtattgaagtagcatacttcaaaataataagagccatctttgacaagcccacagctaacatcatactcaacaggcaaaagctggaagcattccccgtgagaactgaaacaagaccaagatgcccactctcaccactcctaatcaacatagtactggacgtcctagccagagcaataaggcaagtgaaagaaataaaggtttccaaatagaaaaaaaagaagtcaactatctctcttcacaaacatgattttgtacctagaagactccatagtgaacactgcatgttctcactcataggtgggaattgaacaatgagaacacttggacacaggaaggggaacatcacacactggggcctgttgtggggtggggggtgggggagggataccattaggagttatacctaatgtaaatgacgagttaatgggtgcagcacaccaatatggcacatgtatacatatgtaacaaacctgcacgttgtgcacatgtaccctagaactcaaagtgtaattaaaaaatatatatatataaaagaaaactccatagtgtctgtccaaagcctcctgcatctgattaaaaaaaaaaacttcagcaacattttagggtacaaaatcaatgtataaaactcagcatttcaatacatcaataacatccaagctgagagccaaatcgtgaatgcagtcccattcacaatagccacgaaaagaataaaatacctagtaatacagctaaccaaggaggtgaaagttctccacaaggagaattacaaaacactgctcaaagaaatagagatgatacaaacgagtggaaaaacattccrtgctcatagataggaagcatcaacaccattaaagtagccatactgtccaaagcaatttacagattaaatgccattcctatcaaactgccaatgacgtttttcatagaattagaaaaaaccattctaaaattcatacagaacatgaaaaagccagaataaccaaagcaagcctaagcaaaatgaacaaagctagaggcatcagacactacctgacttcaaagtacactacaaggcaacagtaaccaaaatagcatggtacttgtattagtccattttcatactgctataaagaactgccccaaggttccaagatggctgaataggaacagctccagtctgcagcttccagcatgagcaatgcagaagaccagtgatttctgtatttccaactgaggtaccgggttcatctcactggggcttgtcagacagtgggtgcagcccacagagcagggccgggcatcacctcacccgggaaatgccaggggtcgggaattccctttcctagcaaggggaagttgtgacagatggtacctggaaaactgggacactcccaccctaatactgtgcttttccaatgaccttggcaaacggcacactaggaggttatatcccatgcctagctcagagggtcccacacccacagagcctcgctcactgctagcacggcagtctgagatggaactgcaaggcggcagcgaggctgggggaggggtgtctgccattgctgaggcttgagtaggtaaacaaagcggccaggaagctccaactgggtggagcccaccacagctcaaggaggcttgcctgcctctgtagattccacctctgggaattgaactcagctctgcaccaagcggacctaatagacatctacagaactctccaccccaaatcaacagaatatacattcttctcagcaccacactgcacctattccaaaattgaccacatagttggaagtaaagcactcctcagcaaatgtaaaagaacagaaattataacaaactgtctctcagaccacagtgcaatcaaactagaactcaggattaagaaacgcacccaaaactgctcaactacatggaaactgaacaacctgctcctgaatgactattgggtccataacgaaaggaaggcagaaataaagatgtcctttgaaaccaatgagaaaaaagacacaacataccagaatctctggtacacatttaaagcaataaatgcccacaagagaaagcaggaaagatctaaaattgacaccctaacatcacaattaaaagaactagagaagcaagagcaaacacattcaaaagctagcagaaggcaagaaataactaagatcagagcaactaaaggagataaagacaccaaaaaacccttcaagaaatcaatgaatccaggagctggttttttgaaaagatcaaaaaaattgatagaccactagcaagactaataaagaagaaaagagagaagattcaattagatgcaataaaaaatgataaaggggatatcaccatcgatcccacagaaaaacaaactaccatcagagatactataaacacctctatgcaaataaactagaaaatctagaaatggataaattcctggatacatacaccctcccaagactaaaccaggaagaagttgaatccctgaatagaccaataacaggttctgaaattgaggcaataattaacaccctaccaaccaaaaaactccaggaacagatggattcacagccgaattctaccagaagtacaaagaggagctggtaccattccttctgaaactattccaatcaatagaaaaagagggaatcctccctaactcactttatgaggccagcatcatcctgataccaaagcctggcagagacacaacaaaaaaagaattttaaaccaatatccctgatgaacatcgatgccaaaatcctcaataaaatactgccaaaccgaatccagcagcacatcaaaaagcttatccaccatgatcaagtgggcttcatccctgggatgcaaggctggttcaacatatgcaaatcaataaacgtaatccattatataaacagaaccaaagacaaaaactacatgattatctcaatagatgcagaaaaggcctttgacaaaattcagcagcccttcatgctaaaaactctccataagctaggtattgatgggatgtatctcaaaatgataagagctatttatgacaaacccacagccaatatcatactgaatgggcaaaaactggaagcattccctttgaaaactggcacaaaacagggatgccctctcccaccacccctattcaacatagtgttggaagttctagccagggcaatcaggcaagagaaagaaataaagggtatccaatgaggaaaagaggaagtcaaattgtccctgtttgcagatgacatgattgtatatttagaaaaccccattgtctcagcccaaaatctccttaagctgataagtaacttcagcaaagtctcaggatacaaaatcaatgtgaaaacatcacaagcattcttatacaccaataacagacaaacagagagccaaatcatgagtgaactcccattcacaattgcttcaaagagaataaaatagctgggaatccagcttacaagggatgtgaaggacctcttcaagaagaactagaaaccactgctcaatgaaataaaagaggacacaaacaaatagaagaacatttcatgctcatggataggaagaatcaatatcatgaaaatggccatactgcccacagtaatttatagattcaatgccatccccatcaagctaccaatgcctttcttcacagaattggaaaaaactactttaaaggtcatatggaaccaaaaaagagcccgcattgccaagtcaatcctaagccaaaagaacaaagctggaggcatcacactacctgacttcaaactatactacaaggctacagtaaccaaaacagcatggtactggtaccaaaacagagatatagaccaatggaacagaatagagcccgtggaaataataccacacatctacaaccatctgatctttgacaaacctgacaaaaacaagaaatggggaaaggattccctatttaataaatgatgctgggaaaactggctagccatatgtagaaagctgaacctggatcccttccttacaccttatgcaaaaattaattcaaggtggattaaagacttaaacgttagacctaaaaccataaaaaccctagatgaaaacctaggcaataccattcaggacacaggcatgggcaaggacttcatgactacaacaccaaaagcaatggcaacaaaagccaaaattgacaaataggatctaattaaactaaagagcttctgcatagcaaaagaaactactatcagagtgaacaggcaatctatggaatgggagaaaatttttacaatctacccatttgacaaagggctaatatccagaatctacaaagaacttaaacaaatttacaagaaaaaatcaaacaatgccatcaaaaattgggcaaaggatatgaacaggcccttttcaaaagaatacatttatgcagccaacagacacatgaaaaaatgttcatcatcactggccatcagagaaatgcaaatcaaaattacaatgagataccatctcacaccagttagaatggcgatcattaaaaagtcaggaaacaacaggtgctggagaggatgtggagaaataggaacacttttacactgttggtgggactgtaaactagttcaaccattgtggaagacaatgtggcgattcctcaaggatctagaactagaaataccatctgacccagccatcccattactgggtatatacccaaaggattataaatcatgctgttataaagacacatgcacatgtatgtttattgtggcactattcacaatagcaaagacttggaaccaacttaaatgtccatcaacaatagacctgataaagaaaatgtggcacatatacaccatggaatactatgcagccataaaaaaggatgagttcatgtcctttgtagggacatggatgaagctggaaaccatcattctcagcaaactatcccaaggacagaaaaccaaacactgcatgttctcactcataggtgagaattgaataatgagaacacctggacacaggaaggggaacatcacacaccggggcctgttgtggggtggggggaggggggagggatagcattagaagatatacctaatgtaaatgacaagttaacgggtgcagcacaccaacatggcacatgtatacatatgtaacaaacttgcacgttgtgcatatgtaccgcataacttaaagtacaataatggaaggaaggaaggagaaggggaaggggaaggggaaggaggggagggaaggaaggaaaggaaaggaaggaaggaaaagaaagaactgcccaagattgggtaatttataaaggagagaggttcagttgactcacagttcagcatggctggggaggcctcaggaaacttacagtcatggtggaaggtgaacgggaagcaagacaccttctttacagggtggcaggacagagtgagtgcaagcagggtacatgccagatgcttataaaaccatcagatcttgtgagactcactcattgtcatgagaacaacatggggaaaccacccccatccaattatctccacctggtcccgcccttgacacgtgggtattatgcagattacaattcaaggtgagatttggatgggaacacagagccaaaccatatcagtactggtacaaaaacagaaacacaaatcaatggaacagagtagagaacccagaaataaagctgcacacctacaatcatctgatctttgacaaagttgacaaaaacaagcaatggggaaaggactccctattcaataaatggtgctgggataactggctagccatatacagaagactgaaactggaccccttccttataccatatacaaaaatcaactcaggatgcattaaacacttaaatgtaaaacctagaactataaaaaccctagaagaaaacctaggaaataccattctagacataggccttggcaaatatatcatcaggaagactccaaaagcaattgcaacaagaacaaaaattgacaagtgggacctaattaaactaaagatcttctgcacagcaaaagaaactataaacagattaaacagacaacctacagaatgggagaaaatatttgtaagctatgcaactgactctaatatccagaatctataaggaacttaaacaaattaacaaggaaaaaaatttaaaaatgggcaaacgaaatgaacagacacttttccaaagaagatgtacatgcagccaacaagcatatgacaaaaatgctcaacatcactaataattaaacaaatacaaatcaaagccacaatgaaataccatatcacaccagtcagaatggctactattaaaaagccaaaaatatcagaagctggtgagattgcagggaaaatgggacactaatacactgctggtgggaatgtaaattagttcagccactgtggaaagcggtttggagatttctcaaaggatttaaaaacaaaactaccattcaacccagcaatcccattactgggtatatacccaaacgaatataaactgttcaaccataaagactcatgcatgcttatgttcatcacarcactattcacaatagcaaagacatggaatcaaccttgatgcccatcaacagtggactgggtaaagaaaaagaggtaaatatacatcacgcaatactatgcagccatgagaaagaacaaaataatgtcttttgcagcagcatggatgtagctggagactattatcctaagtaaactaacgcaagaacagaaaaccaaatacctcatattctcacttataagtagaagctaaacactgagtacacatgracacaaagaagggaacaactgatgccaaggcccacctaaggatgcagagtgagaggagagttaggattgaaaaactacctcttaggtactatgcttatkacctgggtgatggaataatctgtataccaaactccatgacatacagtttacsattgtaacacacctgcacaggcatccctaaaacaaaacttgtaaagaaaataccaaaatacacattgacaaaagaaaaagaagatactaaagacaacctaaataaagagaggtcttcatagatggaaaggctcaatgttacaaaaatgttagttctccttaatataaactatccaatacaattccagtttaaaaaattgaagagttgagccttttaaatttttttagtattcataacaaaaacaattttaagtttaatagcacaggaggaaaagtaatgaagcttgaaaattaaaagggatacagaatcctaatgacactttgattgactatctcataaagaatcagacatcaggcacagaaaattgccacattttagattcttggctacttgcattttgctagtttttcatatgattattaactataaaacctataaacgagcttttattaggaatcaaagaaagggaataaaggactagggaggatacctcaacctcctttgccaggtgtatggagtttttaaaaaaggttagtagcagctataagggcaaaggaaaacaactgagtctcaggggtttgccacaaggaggaaatgaggttatgaggaacccacatgggcctggagaagcttgtgacattttctcataggctatttacagccaatgccatcacaatacaaataaatttaaaacagtgaagaaaaacagaagtaagctagttttactgattgtagagattactctgtgtgctatgatcaagttccaaatttgtttgagttttctagctgctagaaataacaaaaaggaaaatatgacaaatgttacagtgttcaaaagtagaaatgaggcaacatgttaagtccacatgaaatccctaagtagaatgtatgagaaatagctttcagtctgggttcctacaggcaaggaacaggtgccatctccagctgagtcaagcaaaagagtaattcgctaaacgatattgcaatagctcacaaaatctactaggaagaactgaagtagaggctcaaggctaagccactaggaaagacacactgaagcatgttttagaattggtctggagataaaacagcttcctccagttccacagatactaccatttccacctgctaagctagtgtcccttcaaacccttgtttcctgtagctcatgagtcagatcccatctggtagcatttagttcagagtcttaagtcgcatgcctatgmcctacctgcaaaagaggaaggaaaagtaagcatctggtatttttagctcctataatggatcatccacacttagcacatgtctgtaatactatgaattccccaaacataaaaactagttatactggtacacaaccaaaacaacatgacaaatgtgacaataaccatacaccatccactttcaagttttctacataaccagtgaagtcaatccttagagggacttaaattaagattacaaattgttacttgttcccttatgaactttctgacctaagtattctcaatccaataatgtagttataatcctgcatttatttactgttttcatcagggtttttaatacatccatatatgtaactttcttggatcaatttaacttggtctaggttattcttggatctaccagaacagaacccagaatgcctggaggtgtggatagaatagaaaatctcttttattacctttaagggctgttaaacaaaactgaattcaccagttacaaaagcaaatgattaaggtaagaacagaaatatcaacacattatgcttgtttactttaaaatgaaactatcttctatataaataaaaactgaaattcccaccaaaatgtaaagaatttaaaaggtaaattgtaaacattataaaaaggcattgtggaaaagatgaattcaactaaatgtgcagctatctgaaaatgaggctgtgttgtcttctccttaagtatagtgattacaaatgaggaaggaggattggaggatttccggctgctttctgtagcattgaatggggcctgctttgttagatgacttcaattgcaggatatttcagaaggtggatacatggactatactatatttagactccagctgccagtgagtctgggggaggcatacttaggcttgctgcaaaacgacgatccatggctttcgtgaacaagttatcctgaaatatatgacaaaagatttttttttaaaaatcttcaggcccaactcagaaacatcctttactgataatatgcaaaggagaatttccagaagaaaatgcttctggatagaggagatggaaaatattgaacagagttgttgggagaagaaagtccttttcaacttctcacattgctgccatctgtcctagagacactctgagctacccccataacatcattaaaaccacttctctgggggtcttgctctgttgaacccaggcactgtatgagtcatttcctgaaaatattgaacagactcattgggagaagacaatccttttcagcttctcacattgctgctcctgttccagagacactctgagctacccttataatgaaatgcgaaaagttcccttgtcactctcaaagggcatgcgatgagggagtggctcgctgctgctcaaacctctagggaagcatacagatgggcaggttgcggagctccgaccccatggcagtgtctaggggtgaatatttacagctcctgaagccctagtgggcatgagttacagggtgctcttttagtttagctgtctgtaggcggcttgtgttagctcaagtagaccccctttcttatcacaaggacagaggatttctgtatcccgggttcttgccttgatgtactggaagaatcacacgtggacttggagaattagtgcaaggttttattaagtagaagtagctctcagcagatgggggagccagaaaggagaatggttttccccttgggtcaggccactcggcagcctgggcggcctgggctgtcctccgactgccctggccaaactccaaggcgttctgctggtcagtggcctgccagtgtgctggtgcctgctgatgtgctcctctcaacatccagctgcctgtgtgttcctctgctgatgtggtcctctccacgttcagccgcctgtgtatctgcctgcgagggtgtcaggcacaggattagaggtatggcaggccagggtggtcttgggaaatgcaacatttgcgcaggaaaacaaaaatgcctgtcctcgcccaggtcattggggtggagccctagccagggaccacgacctcctcctctacccagcatttcccttccccacttccgtatcatttaaagggaccatgctcttcccttcccagcactcccatatcaatagtatcatcaaaaaccacttctctgctggtcgtactctgttgaacacagacactgtataagtcactttctaccaccaatccagacaggcctcagtcattgttgaacagcatgaacaaattatcatgactcactaaaaagaaaaatatatcagccagtatgaaacagagaaaacagggcaaaaagagatttatctgactcatgagattgttttagttgttgttgctgattagtaaggttttttaacaccaaatttttcagcatataattgtctcgatctacttagaacatcattaaagtcaacataatttgtccagggattgtaattttatggtggaaaatgtccaaaattgcttatagctattatcattaagtttttacctactcattattccttagtgaatatgaaatgggagaagtgttctcttatccttctcacagggtatgtgacggggtgtggctcacttctttggtatcccgctgctcaaacctctagggggagcatttttggggctccaactccatggcagtgtctagagttgtttacagctcctaaagccccagtgggcgtgtgttacagtgtgctcttttagttttgccatctgcaggcagcttgtgttaatcagctcaattagaccctccaccttattgcaaggacagagggttttctgtatcctgggttccttccctagtgtattggaaaaatcagatcacacgtgggcttggagaatgagtgcatgagtgcaaggttttattgagtcgtggaagtagctctcagcagatgggtggtgagccagaaggggaatggagtgtcttagcgtccagttgcctgtgtgtgtgcccgctagggtttcgggggtttttacaggcacaggatggggggcgtggcatttccctgcycccctccctgtatcaaatagactgcagtttaaacataaggcaataaattaaaaccagcataaattgaaaaaaagtttaaattagttatgtttctcccctgcaaacttaaaaaacacacacacataaaatcactgtcttttccaggaacatggaagactagaaaatataaaattttttcactacaggaggttagaaatgctggacaaaatgtagcaaacactgtgttaagtgcataggtgagagttcaggaaagtgaaataattcccaagtgacccaaaacaagagggaactgaaaaacagcactaagagagaaagaaggagcttctgttactaggaatcaagatttgggttatacctgctgctccctgatggagacaagactttctgagactaagaaaataaggactcagaattgaaatccctacacagaaccagatcatttggagagctatacaatgatggcaaggagatcctagaaaatactgcaaagggagatgacaacacttatattaccatagtggctttgggtggggagaaatattttgtgtaaaaggcagctttcaagtgggtttggtatttattttagttacatggtatgagtaccttcaagctgagaaattaactgaataactggttacaaattggcagtatttttgtgaggccagaaagaaacaaacagaagcaaaacatttctaaagaattcacctaaaacccagactacacaagatttctataggtaaaacacttcttaaaatgaacttgtcttccaaaatacaaaactcaagaaggaacaatcttccacgcacaaatgttagcagaagaagagatagaattatcagctcaaatttccaaataaggataagatgtcaaagcaggaaatgaaaacgggataaaagaaaatatgtatatatgtttttaaaatatactttagaaaacaaagtagaattgaagacgtgaaaaaaaacattaaaaataaaaatcattgaaagggttaaacgtcagactgaacacaactgaagagagaatttgttaactggataatggatttgaagaagttacccagaatgcacgagaggagagaggaggagagcagagaggggagagaggaggagagcagagaggagagagaagatgcaagaggactgaagggctgacataaaatctactaagagggccagacagaaagaacagagaaaatggaggattagtgggcaatatttgaaggaaattcaatgaatgaaaatctttgccaaattatagaaacacttaaatacttagatttagaaaagaaagtaagttccaagctggaggaatgaaattaatttagcttaaattaaaagcaactaaagataaaatgataatgattatctataaaagaacatttattggtataacagcaattatttatgtcagtagcagtaatacagatataaattaatggaaacaattaccagaatatagagtaaaacatgccctttgattttaaaaataaatgctttttgccaagaaaaaagatggaatcatctcctgtcaaagaatgcttggcagtaattcagtaaattaacagaatgtcctggaaactgaaagatgaacccagtaattctaaactgtatgtcatagttattttccaccaactaagggtatatgattgtatgaaggaatgtggttgggttaagggaggtgagtgggtatgcttattgaagaaatagcatgtgatgacaaagcacaatcccagatgttgaagtcatttcatctagagtttggatatttagactatgtgaacccggtggtggtcagtagtgtttaacttatattaggttctaatgcactaacctgtaaaggctgtgacataatgctcttagtgattaaatagtttgtatataaggctaggcgcgatggcttttgcctataaccccagcactttgggaggccaaggcaggccgaggtgggcagattgcttgagctcaggagttcaagaccagcctagccaacatggcaacaacccatctctacaaaaacctacaaaaattagctgggcatgatggcaggtgctgtagtctcagctactcaggaggctgaagcgagaggatggcttgagcctgggaggctgaggttgcagtgagctaagatagcaccactgcactgcagcctgtgtgaaagagtcagagcctgtctcaaaaacaacaacaaaaaaaattatttgtatgtaataaaccaaagctagcaatgtgtttcacatactttccttaaatttcagggatatcctttctcataaataatacctgtgtgggtgttttttttttactacaaaagtaattcctggtggtcatagaaaatctgaaagacatatataagtcacaagaaaaaattttaaatttcctttactcttaccacccagagaaaatattggtcagccttttaggacattttaagttgattttaatttttttaattcaactttgtatttcaagataattgctaacatgcaagtctcaaataatagactgatcttgggcaccctttacccagtttctcccaatggtaacatctttagtacctttagtatagaaaaactatagtacattcaatggtaggctgtcacagaaaaaaaaggaaaagaaaagctatagtacaatatcacagccatgatattaacattgatatagtcaagatacagaacatttcattcaccacaaggatccctgaagttgttctttgatagtcacactcactttccttcttccctcactccttccttaatcctggtaaccactgattctttctccatgtctatactttcatcatttcaataatgttatataaaatggaatcatacagtatgtaacattttgggattgacttttttgtttagcataactctgtggagattcacctagattgttgcctgtatcaatatttttattccattctattgctaaatagtgttgtatggtatggatatgtgtaaccattcacttgttggaggacatttgtgtgtttccagtttttgattacggtaagtaaagttgctataaatattcatgttcaggttttttgtgttaaatgtgttaatttctatgagataaatgcccagaagtgaaattgctgggtcatatggtagttgcatgtttagtttcttaacaagctccaacttcatatcattacatttgaagtaagtttcttatatagtagatcatgtttttaaatccgctctgacaatctctgtcttttaatttgtgtagttagaatagtgttatgacttaacactgacattttttgttgttttcctctatttgttttctctagtttttgttttagttttccttttcttgcttccctacaggttacttgaatattttaaaactttattttaatttaggtacagtgtttttgagcatatgtctttgtatagcttttttagtgatattaaattatacttgatattacattatatatacataacttatcacagtctattgtgtcattattttgaatgaaatatggaagtctcatctctttatattcccttccccttccccatttatagtataattattataactatttcctgcccatatatttggaaccacatcaatcagtgttataacttttgcttaatctggtaaacataacaacaaaatttaagaagaaaaggaaaactaattacatttatgcatatttttgtgtactatctttattccttcttgctgttttgaggctccttctttcatcattccttttctgtttagaaaaattcctttagcctaaaaggagtaggtctgctagtgacaaattatcttagtttccctttaactgagaatgtcttaattttcccttcagttctgaagtatatttttactgggtataggattctgggttgacaattcttttcttttagcatttaaaaaaaatattgtgccacttccttcctgccgtgaataagacatttatattgctgatgttaaggaataagagaaatatccaatgttgaaagagagtgcaagagaatgtatatagtccatatagaattaaatctgtgtcatggtggggtactctataatggttttgctgttcagtatagagcttgggcattctcaaatttaatcttcatgcattaagctattcaaaaccaactacaaacatgcttgatatgtagtgtgttatatttctaaggcatatatttaccttgtggtgttatgaatttgttgtgtaagaggcatactaagctaataagtaagcctagatgcccattcagtgtagaatctatgtggcctgaaaagggagagaaagattaatggtaagtattaaaataactgtgctaagcataaaaatagctaacattcatttaacactttccatgtgccagatagtatggcattcatttaacaggtgttaactatttttattctcacaatacattgtttgaggcagataatactaatttccccactttatagatgagaaaactaaagctcgggatgttatgtaacttgcccaagccacacataataacagtggcataaccagaattcagaatttaaatccatacagtctgtctttgattccatgctgtctatcctgtttaacttttacatgacaaagatatcttttacagcattaaattgcaccagggaactctaacccatctggcccgggtcagaaaagggacaaaatgtcaacttttaagtattcaaaaatggtatttgtttctttcatttattcatttgctatgtagcaatcaccattgtataatatctccataagaagatattgtttgaaaggaaatccatcatttattaaaaatatgtataaaacacttacaatgggccaggcattgttctaagtagataagatacataaattaccaaaacacacaaagattcacaccattaaagagtttgtatcttagcatgagggaggaagaaaataaacaatagctaaaaaaaaagaaataaattatatagtatatttgaaagtgaagatgaaaaaaataaaactagtgtaggtaagtgtgatcatcagagaagcaagcaacattaaatggggtggtcactattggaagatgacatatgatgatgagagaatttgtctttgaggaagattccagctagagaagacaattctatatccctaaattgggaaagcacatgcatgcctgaagactggcaagagggctagtgtatggaagtaaatgatcccgtgaaagagtagtaggaaataaagtaaaagagacatgtataatcatgaaaatcactgaaaggtttggagatattgtggggggagtccttgtttgttggttttttaatagcagtgatataattcacatatcataaagtttataaagtatacaattcagtagtttatatatattcacacaggtgtgctaccagtatcacagtccaactccagagtatttccatcgctctccaaaatcaccatatctattagcaaccactcttcaagtccgcatcccccagcctttggaaaccacagatttcctcaccgcctctaagaaattgcctattttgaggctcaaagtaaagggttggaggaagatctaccaaccaaatggaaaacaaaaaaaggcaggggttgcaatcctagtctctcataaaacagactttaaaccaacaaagatcaaaagagacaaagaaggccattacataatggtaaagggatcaattcaacaagaagagctaactatcctaaatatatatgcacccaatacaggagcactcagattcataaagcaagtccttagagacctacaaagagacttagactcccacacagtaataatgggagactttaacaccccactatcaacattagacagatcaatgagacaaagttaacaaggatatccaggaattgaattcagctctgcaccaagcagacctaatagacatctacagaactctccaccccaaatcaacagaatatacattcttctcagcaccacactgcacctattccaaaattgaccacatagttggaagtaaagcactcctcagcaaatgtaaaagaacagaaattataataaactgtctctcagaccacagtgcaatcaaactagaactcaggattaagaaactcacacaaaaccgctcaactacatgtaaactgaagaacctgctcctgaatgactactgggtacataacgaaatgaaggcagaaataaaaatgttctttgaaaccaacgagaacaaagacacaacataccagaatctctgtgacacatttaaaacagtgtgtagagggaaatttatagcgctgaatgcccacaagagaaagcaggaaagatctaaaattgacaccctaacatcacaattaaaagaactagagaaggaagagcaaacacattcaaaagctagcagaaggcaagaaataaccaagatgggagcagaactgaaggagatagagacacaaaaaacccatcaaaaaaatcaatgaatccaggagctggttttttgaaaagatcaacaaaattgatggaccactagcaagactgataaggaagaaaagagagaagaatcaaatagatgaaataaaaactgataaagggagtatcaagaccgatcccacagaaatacaaactaccatcagagaatactataaacacctctacgcaaataaactagaaaatctagaagaaatggataaattcctcgacacatacaccctcccaagactaaaccaggaagaagttgaatctctgaatagaccaataacaggctctgaaattgaggcaataattaatagcttaccaaccaaaaaacagtccaggaccagacagattcacagccgaattctaccagaggtacaaagaggagctggtaccattccttctgaaactattccaatcaacagaaaaagagggaatcctccctaactcattttatgaggccagcatcatcctgataccaaagcctggcagagacacaacaaaaaaagagaattttagaccaatattcctggtgaacatcgatgcaaaaatcctcaataaaatactggcaaaccgaatccagcagcacatccaaaagcttaatcaccatgatcaagtgggcttcatccctgggatgcaaggctggttcaacatacacaaatcaataaacgtaatccaccatataaacataaccaaagacaaaaaccacatgattatctcaatagatgcagaaaagaccttcgataaaattgaacagcgcttcatgctaaaaactctccataagctaggtattgttgggatgtatctcaaaataataagagctatttatgacaaacccacagccagtatcatactgaatgggcaaaaactggaagcattctctttgaaaactggcacaagacaggggtgccctctctcaccactcctattcaacatagtgttggaagttctggccagggcaatcaggcaggagaaagatataaagggtattcacttaggaaaagaagaagtcaaattgtccctgtttgcagataacctgattgtatatctagaaaaccccatcgtctcagtccaaaatctcgttaagctgataagcaacttcagcaaagtctcaggatacaaaatcaatgtacaaaaatcacaagcattcttatacaccaataacagacagagagccaaatcatgagtgaactcccattcacaattgcttcaaagagaataaaatacctaggaatccaacttacaagggttgtgaaggacctcttcaaggagaactacaaaccactgctcaacgaaataaaagaggacacaaacaaatagaagaacattccatgctcatggataggaagaatcaatatcgtgaaaatggccatactgcccaaggtaatttataaattcaatgccatccccatcaagctaccaatgactttcttcacagaattggaaaaattactttaaagttcatatggaaccaaaaaagagcctgcaccgccaagtcaatcctaagccaaaagaacaaagctggaggcatcacgctacctgacttcaaactatattacaaggctacagtaaccaaaacagcatggtactggtaccaaaacagagatatagaccaatggaacagaatagagcccatggaaataataacaaacatctacaaccatctgatctttgacaaacctgacaaaaacaagaaatgggaaaggattccctatttaataaatggtgctgggaaaactggctagccatatgcagaaagctgaaactggaccccttccttacaccttatacaaaaattaattcagaatggattaaagatttaaatgttagacctaaaaccatagaaaccctagatgaaaacctaggcaatacaattcaggacataggcatgggcaaggacttcatgtctaaaacaccaaaagcaatggcaacaaaagccaaaattgacaaatgggatctaattaaactaaagagcttctgcacagcgaaagaaactaccaacctacagtgaacaggcaacctacagaatgggagaaaatttttgcaatctactcatctgacaaagggctaatatccagaatccacaacgaactcaaacaaatttacaagaaaaaatcgaacaaccccatcaaaaagtgggcaaaggatatgaacagacacttctcaaaagaagacatttatgcagccaacagacatatgaaaaaatgctcatcatcactggccatcagagaaatgcaaatcaaaatcacaatgagataccatctcacaccagttagaatggcgatcattaaaaagtcaggaaacaataggtgctggagaggatgtggagaaataggaacacttttacactgttggtgggactgtaaactagttcaaccattgtggaagacagtgtggcgattcctcaaggatctagaactagaaatatcatttgacgcagccatccaattactgggtatatatccaaaggattataaatcatgctgttatacagacacatgcacacatatgtttattgtggcactattcacaatagcaaagacttggaaccgacccaaatgtccatcaatgatagacctgataaagaaaatgttgtacatatacaccatggaatactatgcagccataaaaaaggatgagttcatgtcctttgtagggacatggatgaagctggaaaccatcattctcagcaaactatcacaaggacagaaaaccaaacaccgcgtgttctcactcataggtgggaattgagcaatgacaactcttggccacaggaaggggaacatcacacaccggggcctctcatggggtgggggtggggggagggttagcatttggagacatacctaatgtaaatgacgagttaatgggtgcagcacacaccaacatggcacatgtacacatatgtaacaaacctgcacattgtgcacatgtaccctggaacttaaagtataataataaaaaaaaaataataaacaaatggtatccctgggaatcatatagataatatggtaaataaaatggaaaaatagaaaaaaaaagaaattgcctattttggacattttatatgaaaagagtcatataatatatggccttctgtgtctggcttcttccatctgacataacgttctcaaggtacatccatagtgtagcacatatcaatactttgttttctttccttccttccttccttccttccttccttccttccttccttccttcctttctttctttctttctttctttctttcctttctttcttttctttcggcagagtcttgccctctcacccagcctggagtgcagtggtgggatcttggctcactgcaagctccacctctgcctcctgggttcatgccattctcctgcctcagcctcttgtgtagctgggactacaggcacccgccaccacgcccggctaatttttttttgtatttttagtagagatggggtttcaccatgttagccaggatggtctcaatctcctgacctcatgatccacccacctcggcctcccaaagtgctgggattacaggtgtcagccacccgtgcctggccactttgttccttttcatggctgaatgatatttcattttatggttataccgcattttgtttattcatttgtcacctggattgtttccactttttggctgttacaaataattctgttataaaccttcttgtacaagttttggcataggtatatttttcatttctcttgagtgagaacctaggagtggaattactgggctatatggtaactccacataagttttagaattttactctgagtatacttatttcaataagtataaagaggagtgatataatctgacttgcactttaaaagataactcagactatggtgttgagaatatactgtaagataacaattttttaaaaagcggagcagcccagcatggcagctcacatctgtaatcccaacactttgggaggccgacacaggaggatcacttgagcccaggagtctgagaccagtctgggcaacatagacaaaccctctatgtctctacaaaaaaatacaaaaattagccaagtatgatgatatgtgcctgtagtcccagctatttgagaggctgagatggaaggatcacttgagtccaggaggttgaggttgaactgtgatgacaccacagcactccagcctcagtgacaaggcacgactgtgtttcgaaagacagagagaaggagagagagggagggagggagggagggaggaaggaaaggaaggaaggaaggaaggaaggaaggaaggaaggaaggagggagggaaggaaggaaaataacctagttaaaagtttgtacttggttgaatagcttccctccaaaattcatgtatacctggaaactgaatgtggcctcatttggaaataggttctttgcagatgtaatcagttaagatgaggtcataccgggttgaggtggaccctaatctaatgattggtttacttataagaaatgagacattttagctgggcatggtggctcacgtctgaaatcccagcactttaggaggccgagacgggtggatcacttgatgtcaggagttcgagacaggcctggccaatatggtgaaaccccatctctactagaaatacaaaaattagctgggcatggtggcaggcacttgtaatcctagctactccagaggctgagtcaggagaatcacttgaacccaggagatggaggttgcagtgagccgagatcatgccactgcactccagcctgggtgacagtgagaatccatctcaaaaaaaggaatgagacatctggacacaaacacaggaaaaaaaaaatccatgtgaaggtggacacatagattgaaatgttgcatctacaagccaagaaatccctgatgtcactgacactagatgtaccagatctagaaaagaagaacctacatcgctcctggatccttcgtagagagcaaggcactgctaacacctttattttggacttctatcctccagaactgtgaaagaaaaaaaaatctgttgctaaaagtcccccaacttgcagtactttgttacggcagcccgaggaaatgaatacggaggatattgttgttatttaggtgagaaatagagttggcccagactagtgtgatagaagtcaaggtgaagaaaaaaggtcagaatctagaattattttgaaagtagagctataagatttaccaaaggattgaatgtaggttttgagggaataataaaggaaccaagaataatccaagacttttaatctaaactattggaaagatgttgccataaactgaatgaggaaggctttgggtggagcagcactcaggggaaatacaaagagtccagttgttaacttttagaagcctatttaatacccaagtggagatgtcaggtaggcagttgtacataaaagtcttgaattctggagagaggtctcagctaaagatataaatttctgagtggtccacataacagaggcattttcagccattagatggcacaaggttgaaagagatcactaaggaatgcagagcagagacgaaagcaaggcctaccctgggtactgcaatgttagtaggtcaaggaaaagagaagaaatcagcaaaggagactagaagggagcaactggtgaggaaaaaggaagactaagaaattgtgatgcttgtcactaatcatcagggaaatgcaaattaaaccacaaagagttaccagcttactcctgcaggaatggccataattaaaaagtcaaaaagcaatagatgttggcatggatgtggtgcaaagggaacatctttacattgctagtgggaatgtaaattagtaccaccactatagaaagtaatatgcagattccttaaagaactaaaagtagaactaccattcaatccagtaatcccactactgagtatctacccaaaggaaaagaagtcatataaaaaagacacatgtacatgtatgtttatagcagcacaattagcaaatgcaagaatatggaaccaatctaagtgcccatcgaccgagttgataataaaaatatggtatatatgtatatgccatggaatactactgagctataaaaaggaacaataataatgtcttttgcggcaacttggatagagctggaggtcattattgtaagtgaagtaactcaggaatggaaaacccaatattgtatgttttcacttacaagtggaacttagctataaggatgcaaaggcataagagtgattaatgggccgggcgcggtggctccgcctgtaatcccagcactttgggaggccgaggcgggcggatcacgaggtcaggagatcgagaccatcccggctaaaacggtgaaaccccgtctctactaaaaatacaaaaaattagccgggcgtagtggcgggcgcctgtagtcccagctacttgggaggctgaggcaggagaatggcgtgaacccgggaggcggagcttgcagtgagcmgagatcccgccactgcactccagcctgggcgacagaacgagactccgtctcaaaaaaaaaaaaaaaaaaaaaaaaagagtgattaatggactttgggggctcgatgggggaggtttggaggggttaagggataagagaatattgggtacagtataaactgcttgggtgacaggcacactaaaatttcagaaattagcactaaagaacttacccatttaaccaaaaaccatctgtacccccaaaaactattgaaattaaaaaaaaattgtgattgatgtggtttcgctgcatcctcgcccaaatctcatttgtattttagccccaataatccccacatgtcatggaagggacctggtggcaggtaattgaatcatggaggtgggtctttctcgtgctgttctcgtgatagtgaataaatctcacaagatctgatggttttataaaggggagttcccctgcacatgccctctttgcctgctgccaggtaagatgtgtctttgctcctctttgccttctgccatgattgtgaggcctcttcaaccatgtgaactgtgagtcaattaactcttccctttataaattacccagtcttgggggtgtctttattagcagcgtgagaacagactaataaaatgatacctgtactagaatccacttgaagaaagggaagcacaaattgatcaccaaggtgtgacataggaaagcatagtttgatggtccatcaaacactattgataggaaaaagtgagaactaagaattgagcattcaatttagcaatataaatattattgtgactaggatgaacaatagtttcagcagagtgtttaaagtaaaatcttggttagtgggtttgtagctgaaagagaggaaattggagacagcaattacagacacttgaaatttttatcagggaagatttcaagcatataaaaatatgaattaacaaaaaatgaaacccatcacccacattcaattgtttttaactgatagccaatgttgttcatctacttccccactccctctgtccctaccttaccagattattttgaagatactctgaaaaaataattkaacttcattcataaaaatttagacttctgctttaaggctcttgcattttttctttttctataaaaggagcaaaaaaacagatggtaatttgcaggtggaagtgaggttaagagaagatatttgtaaaccacttttggatccctgggttcagatgtggactagcaagagagttggatttaaccagggttttggttttgccatgtataaaacactgtgaggttcaagggtgtatgcaaaggaatgattactatcctttgataattgactatgtgaccataagcattttagctgggtaaggagtggagtgatgacataaagtgggtgaaatacactgacaaggtgatagaatcatagcttagaggtcaaggtggagtaataaagtggtggtggtcaaagagcacaagttagtcagagaagcgggtttacaggaaataagccagagaatgttcatcaacgtgtatattaacccatttcctgtttagaaaaaaaaagtgtggcttgctgccagcactcactgaattttacgtaaacacactctttgaggctgaagcaaatctgactgatttttcaatgtgaaaataaaatataaaaattcttcatggagttatttctaaacagaacttgtctctaatcctaatgtaacagaaatgtatatgatattacattaggattagagacaagagaacaagaatattcttggggcaaacaggaaatgggttaaggaattagactagagtagatttatagataaggagactaagctcaagagcgaaaatcatagagaaatgagttgaattacagaatgggagtggctggtgtcttttagaaaggagggagtatattctgaacatagcaatgaggatcaagaaaaaattagcccatgaccagagagagctgtgagagtataaataaacagtgcccacctaagaagactgtaagataagcaggagggagagctgtaattccattagagcaatgaaaagagattttccttggccactgcgtgacgcttttttaacatgtttttttccctcaaccataaacaattgcaggcacagttgtgagcatgggcaaattcaggttttatgtgacctgaaacttacttagtttggaggactttctttaaggaaagactgtaaaatttttattttcccagattttaccaacaaaaaagtgcaattatgcaaacccattatccacttaccttccaatagcccactcgaaaggggctattgggaaacaattctctatggatattttcacctttctgcatgatccaggctttctgagcaaacaatatggtcaaacttgattaaataattattaagtggtaaacatgccttggaagccagaaattgtgtattaatctggaaatatttatcccttggataaatcccacttgatcatgctaaatgatctttttaatgtgttgttgaatttggtttgctagcattttgttgaggatttttacaactatgttcaccagaaatattggcctaacactctttttttctgtgtctttgtccaattttggtatcaaggtaatgctgaccttgtagaaagagtttggaagtattaccacttctcccattttttttggaagagtttgagttttttctttaaaagtttgacagaattaagcattgatgcaatcaggtcctaggcttttctttaatgggagactttttattacagctttgatctcattacttgtttgttcaagttatttttttctttatgattcaatcttagtaagttgtatgtgttcagtaatttatcaatgtcttttagattttccaaaagaaacttgtggtttcttttggaaaaagttgtccataattgtttttaatgattctttgtatttctgtggtctcatttgttaactctccctttttgtttctgattttatttacatgggtcttttctcttttgttcttagtttaggtaaaggtttgttaatttattttttcaaaaaaacctttttgttgatattttgtattttttactctcaatttcatttacttctgctctgatctttattatttctttctttctactaaatttggttttgttttgttctcttttctagctccctgaggtgcatcattaggttgttaatttgaagttcaaagataatatagaaatacagtggtcattgtaagaaagttttaacctagacaaaactgttcatttatgaagtggattggaaaagaagaaattctgaattcctcaagaacaatggaatgtagattttgattatcatgcagagccttacaagagactcaataaatcaaaatatgcctctcttaaagacttctggccagaagcagtggctcacacctgtaatcctagcactttgtgaggctgaagagggcagatggcttgagctcaggagtttgagaccagcctggacaacatagggaaacctcatctctattaaaaataaacataataataacaattagccaggcatggtggcacaagcctgcagtcccaactactcaggaggctgaggtgggagtgttggagtaggtagttaggcagacatgaacatcagaagaaaagcccatcccccaccagtaatgtcaggcaaccattaggtgatggtcaggtagttgttaagcagtctttttaaaataataattggttgcagtcagtgccagagaaaggcagtctcccaatatatggaaaacacttgaagccggtggccaacagcttcccaataaggagctgagcaagcagtctcaagcatgcactaagaggcaaaatggcagagtttaactggtgtatgaccagttcctctaggaacacttgactggcaagggaaaaacgcctcaagtgagcatgcacacaacttcagtaaatacactgtgcatgtggccgctcacaagtgctggcaggccactgtgcatgtggatggcccaccccaaggaaaaatcaagagtggagagacacaaaactccagaagcatgccaacatataaaaccccaagtcaaaggtcaaacagggcacttggatttctcaggttgccaacttggccctcttccaagttactttactttctttcattcctgctctaagagtttttaataaactcttacttctgctcaaaaacttgccttggtctctcactctcgcttatgcccctcagacaaattctttcctttgaagaggcaagaaacaagttcttgcagacccatacagattcactgctgctaacatactttgatgccacatggcttggatacgttccccagtggtaagaaatctctatgcctctccttctttggctggagaagaaggagatctgtacacagttttcttctcccctttcactctcctgccttccaaccaattcccagaactattactctcagccacagtggctctgcacccgctggctgatctctcagcttaccctgaccggtggcttacaggggtaggaaggaccttggagtccacaccatgtagacctgaaatactaatggccctcctagacaggaggctcatgagagtggtagggctaaagcctaacactgtgcaatgtctgcaatttcctctgctttttcaaatacaattgtctttttccccaaaacccacaccacctattctcctgttttctctgtgtgtgttctgaaacggccttgtgtgcccaccacactgtctacctcaggggcaagtctgtctctcttctttcactttgtatgccacgcaacttccttctctacgttaaacacacactccctgttattcgttcacccatggctcttgttgcatttgtacagcagcagagaaacaggctcccttgcagatgtccattggctcattgccaggatagacactaattagaaccccagttcttccagctccttatgacttaccatacacttttcatccctgttatgctccrgggtcaagtttttggtggcttttgaagcagtttttatggctgcataggacatcactctgtggttctttaaggatctcacctacttgctttttttgagttagcaccccctttgggaggagagaaaattcttcctttgccatttgtgggctcttatcccaagctccgagttctccaaagattcctctttatgtcaagagggcaaataaacattgctgttttgaatcccagggctgctgtttatgtgagcatatgaaggttttccgtcagtattcctcatgcttcctcccactttctcctatagcagaggggttgtcctgtctactcaagcatttcttctggatattaccccaggaggacagggaacctcwaatacaaaattttctccattcctctaatcacttccataccctcctcaatgtgcttaaggactctcaaggtcatatttaaagggagggaagtgcagcctcttgcagcagttggctgaaaaacaagcttctcatctacttaaagaacatgggaaatggattataaaaaaaaaagaggtaatcattttgttgccagaatgctgtgagtaagagtcactataagatcatggagataaggatataggccagcccaaggctgcaggtgcaagagacaaagtacccataggacagagagagataaaggctggtcacaggccacaggcacagaacagattaccattagaacagagatgaaggcaagcttaggggtacctggtaagaccggtttattctgaaactccaaggataaataggggacccctgttcacttgggtatttcctctgttctcaagtgggtaattgtgatgagatgggacacaggtttgggtacccagtaagacaggttcattctggaaccctaaggatgaatgggggatgccctgttcaggaaaggataatagggaaataaaaggagataccttctttttcctttttttctcctttgttgtatcttcacagatgggtaatcacatctccctactacagtacaaaccctttggatgcatcctcaagaactgaaagtttgaccccaaaaccctgaaaaggaaaaggctaatatttttctgtatcacagcctggttttaatacaagctccaggagcaggaatcttgaccagaaagtggaagcataaattttaaatttttaatatgctctatcagctagatctgttttgccactagcagggaaaatagacagaaatcccctatgtacaggccctaagaaacaacccagacctttgttgggcttgtaaaattgatccagtgatgatagcagccataatcatgctgccccatctggttggttcgggagacccctcattgggtttacccagggctcaagccctggaggaaccaagagtggagcttagctcaaaccctaccctttggccccattatatccaagtctcctggccctggagccytcccttccctacccagggccatcctctggacaccaccccctcaagttatgctcccttcaagaagttagttgacctactagagttcagactccatttaatatgcaagacctgagtcaaattaaaacagaactagggaagtttatggaggatcctgacaaatgcatcaaagggttccataaactgggcttaacatttgaactcacttggagggatctctcagtcatactgggacaaaccctgtctaagggagaacatgactccattatggaggcaccccaaaaatttgcaaatgcaatacacatgactgaccttggtggctaccctgtatgggccaccacagttcactgggtcagccccaattgggattacaatacccatgggggcatatgggcaaagaattgcatgttcttatgtctcgtagaaggaatgaaagctagaagagccaagcctgtaaactataataaaattggtcttaatagatcaaggacctcttggaaaccccaccactttcctagagaggctacaagaggccctggtgaaacacactaacctagacccagagacatcacaagggcaactggtcctgaaggaccattttttaactcaggcagccccacatatttggaggaaactctaaaaactagcactggaccccaaaacccttatgcctgacatcttcaacatagcttcctctgtcttttacaaccaggactaggagaaagaggaaagggctcagggaaagaagaggtaaaaggaaaagcagcagctccaactattggctgccctaaaaatccaccagccctctccaagttgccctcagaatactctcccagttaactgccatcagtgtgggaagccaagacactggaagacaaactgccgcagtgggacagatgggaaaaatccctacatggcttgccctttctgtcacaaactcaaccactggaaatggaactgccctgagggctgaagggcccctagaacagaatcccaattcctgatggccttaagctgaaaaggcccgccactccagcagctcctggactgaacattactattgaagggacagagctaagggctgctttggatgtggcaggtaggactataagttttctttgggaaatggccttcttggtgcttatgtcttcatgggcaattatcctccaaggtgatggggttaaattgggtgcccataacccaaaggttcactcctcatctttgctgcctgtgaggggagactgtcttttctcattcatttttaatgatagcagaatgtcctacactgcttttgggtagagatattttatttagactaggggcttagttaaccttttccaaatgcaatcttatgcctcaaggaagtcacacacaaggatgaacttcccagacttttccattaatccagaagtctggggctcaagaatatcaggaaaggtcataatgataatgcctatagtaactcagctcatggatccttctagctaaccttgtagaaggcagcttcctctttgacctctggccaaaagggacttcatcccctaattgaaaaatgtctaaaacatggattattaatatactataactcgctatgtaacacccctgtcttacctgttaaaaagagcaatggagcaatggacaatataggctagtccaggacctgcaaatcataaatgaggcagtagtcccaatacacccaatggtccccaacccatatattattctaggagaagtacccccagatgctcatttgttctcagtcttagagctcaaagatgctttcttttgtgtctccctagactcatcctcccaatttgtatttgcacttgaattggggaatgaaaaaggaaggagtctacagctaatctggatagtacttccgcaaggttccagagatggttccaatttgtttgggcaagtcttggctagagatttgcaggacctaactcttgagggttgagggtgtctcctacagtacatagatgacagatgacctgttaatctgctcccctacaagagagttatgaatcctgcatctagtccagacactagattttctcacagagggtacaagatgtctaaggccaaggcacatcgattaagaaaagaggtttaatacctggggataatcctgatcccacagagaacataagctttctccagaatggatacaggccatccttagaatacctaccmcaaccaccyaaaagcaactttgggcttttctggggatcacaagatattccagactttcaatactggcatatggtggaattattaagtccttatatcaggttctaaaagaagggactcatcaggacccacttctctgggaaaaagatcagaagcaagcctttagagaactaaaaactgccttctcacaagccctagcccttgggctacccatactaaccaaaccgtttcagcttttcatcactgaaagtaagctgtagccctggaagttctaactcaaaccatcaggccatcaaatgtcctataggttactttttaaagaacctagacccagtagtgcaagggtggccacactgcctaaaggtagtggctgcagcagcccttttacccaaggaggccctcaaaatcacartgggacagtcggtcaggctcctgacattccaactaataggccccttattggatataaaaagaccgcaatggatcactgacaacagactgctaaactaccaagtcttgttgtcagaaaacccacaggtaacagttgagtggtgttccactcttaacccagcctccttactgccactactagaagaggataactgaacacattcatgttgtgagatacttaaccaaatttatgccagccaggaagacttacaatatcagcccctaggttatctagatgaaatatggttttcagataggattggctttgtcaagaatggagatagatatgcagggtatgctatatgtcccttcacccagttacagaggtggtagctctgtccctggggacctcagtgcaactagctgacccatcacattgaccagggccctaaaacttggggaaagaaaaagaataaccacatatacagattccaaatatgccttcctggtgcttcacacccacatggctaaccagaaggaagggggatacctaacagcttggaatactcctattacatagagacctccaatcttagagctactagaggctgttcatttgcctcaggaagtggcagcagtgcactgtaaagaataccacaggggttctgatgaaactgcatggggaaatatgttatctgaccaaaaagctaaagaggcagccatctcaaaagacacctctgtggggactttactcccctctctccccagtgaactgcccttctccaatacactaaggaagaaatagattgggccatccagcatgggtataaagaagaaaccaatggatggtacatgttgggagaacttctccatctacctaatgcttcccagtggaaagtcatcaagtgtttacttgactcatgccaccttgaaaaggacagtctagggtaaatttgtaaatgggtgttcagtgggaagggactaaccaaaattattcaataggtttgtcaagcctgcaccttgtgaaccacaaataatccctagatggggaagccccctccataataagtcaaatccaaaggagaggtacatactctggggaggactggtagatggacttcactcagctacccacatgccacaggtgtaagtacctcttggtctgtgtaggtaccttcacagaacgggaagactcctgccccacaaggactgaaaaggcacaggagatagctgacttgctcctaaaggaactcattccctgctttgaactccccaggtcattgcagagtgacagtgattcatctttttttccccaagtaacttaacaggttagtaatgccctaggcatraagtggtaccctcactttgcctgagaactgcaatcttcaggaaaagtggaaagaatttaccaaaccctgaaatgcatcctcaataatctctgtcaggaaatagcagtcatgggtggacctcttacctttaaccctccttcaaatctgtattgcccctaaggctccctagcaattaagcccctttgagatcttatattgtaggccatttctatattcagacttatctgatactagatgaagaaactgccaaaatcacccagtatgtttcttctttagcaggcttccaacagactctctgggaatatgggttaaaaacaaacccaacgtcggaaggggaaacaatcccagcctctgtatcttccaggctctagttctcattaaagcttggaaggttgaaaccccaaattcctaactaactgtattctgggggggccacttcactgctccagtatctattcccacagccattaaagtaccagagatagccagctggatacatcatgcctgggtgaagtcatggaaaggccatgcaacaccagagccagaaccaacaccctcagctccagaatacacttgtgaggcactggaagacctgaaattcctcttttagtgaaaacataagtaatgccccctcaacatcctttcacctcaaagtaaggtgatcctagtattaggaattttactaacaattgttatgattattatcactattttaatcccaacttgtacaccaccaggagttccagtggcagcttgctttgtgatcaatttctctctctcacaatcaccttaggtcaccatggctctgctcctgttggttctcatactcaacgctttactggcagcacactgccatcctgatttcctgttatgagaaaaagctcagcaattgctccaaaacacaggatccccttactccaccaaatgctggttatktactagctcttcctctaaaacaccagggagagcttatccagcctgtaccagagattggacaagcatagacatagarttacgtatttcctctcaacaggaccctaatctgaaagagctatttgggtctgcaaataacattttttgcaaaagcaaagcagtatttacttgacatccacaaggcacctctcatttttggatcaatcttttctaatatcactttaatgggaataacctctatttgtcttatggccaaaagaaaaagatggattggatgtaggctctttcccagtatagcttgtaatgttactctctctgtagattctaaccaacagactgatggaacatacaccgaaaaccaattccaccatcaaccaagattccccaaaccttcaaatattatctttcttcaggcaactttgctaattaagtccattcagttttgccagcaatgcccaagctcatgcagtacttgaaatttctagttccagcctgatgattataaccaatgtctgcaaattgccaacctcagctccacagcagaatgggttctaatggastaaactcaaaattctctttttttgggaaaatgaaaccaagggagctaatcagagccaaaccccatgtacccaagtgttagcaggcatgaatgtagctaccagctacctgggtgtgttgtcatccttggtatttttgggggctgtcctcatctcttmttttgttttgacatctctacttgtcttaaaacccaaggagccttctgtgtttgtggccaatcagtttaccaatgcctcctcattaaatggactggaacttgtaccatagattatgtacccctggacatctttatactccctggcaatctctctcttccagcaccaatccatgggaattctatcttgcccagggtgaaaagggctatccaattaattccccttcttatgggcctcagcattatagctggtatgggaacctaaactgcckgaatctcaaaagcctccttgacctatagccaactctgaaaggaaatagccagcaagtttaatatcatggctaaaacctcaaccatggccagagcaaattaacactttagcagttgtagtcctccaaaaytgtcaaggactagatatgttaatggcagcacagggaggaatttgtttagctttagatgaaamatgttgcttttgggtaaatcaatcagtaaaagtacaaaacracatcagayaactcctaaatcgagcctccagcttacaagaacaagcctctcgtggttagttagattggtaaggaacctggaaatgggatcttccctgggttcttccctttttaggcccacatgttagcctctacttttgctcctttcagtccatgtcttcaaaaatctaataacccaatttgtctcctttctctcacctttagatgatcaagttccagatgatcctcagtgagggataccatcctttcaatattcaagagtcacccttctacagaggactcctagacttcccatcagtgggacatggcagaggtgaaatcctgcccctgtctcccttagacctggctggatactgcttccaacaacccatgcagccaccctgccctgacagctagcaagaggccaagacccacagaacaatcaccatcacacctctgtcagcaggaagcagttacagaagactgaccttcatccagtttcccaaagaattgggtcatggatttttgcgggggaaaatgttagagtaggtaattaggcagacatgagtaagggaggagagaccccctccaactaggaatgtcaggtgagcatcagatgatcatcaggtggttgttaaactctctctctaaaataataataggttgcaactggcagcagggaaagacaatctcccaatagatagaaaagtcctgaagctggtgatcagcagcttcctagtaagatctcaggatttgggcaagcaggctcaaacatgggcactaagaggcaaaatcgtggagtttaactggtatacagacttcctctaaaaacacatgactcatgcacatgtggacagcctgccccaaggaaaaatcaaaagaggagagatgcaaaaccccagaagcatgccaatatataaaaccccaagtctaaggtcaaacagggcacttggatttctcaagttgcccacttggccctcttctaagtgtactttatttcctttcattcctgctctaaaactttttaaatttcactcctgctcaaaaacttgcctcagtctttcactctgccttatgccccttggaagaattatttccttcaagatggcaaaaagcaagctgctgcagacccatacagatttgctgctgctaacaggaggataacttgagcccagaaggttaaggctgcggtgagccttgattatgccactgctctccagcctggcaacagaatgagactctatttttttttcttttaaaaagactttttacaaaaggcaaaatgataatggaactaaaaatgtacgttgactgacttaactccaactgcttcttccctcaattgaaaccacctttgcaaaaattataacagtgagaaaattatggcagtaggggtgatctgatcaagccaaaccccatcttgcctttagccttcaagctgcccataattattcctgggcttaggccaagctaactttgggagacacttggtctatagtttaaatgataatagtccttccttaaaattcaaccacctcagcaaagctgatgagaggccaccaggcaaggaggatagaggagtctaaattctgctaaggtgtagatataaacagtttccagccattattctggaggtcacaaaatgtgcaacttcttcaattactcctgcagataacatcagtattttagaacctaagattggccttttgagatgtcttttcaggtttttttgtgtgtctgactaccgatggctccacctggacccaccaaccactcctgtggccccatccagaagcaactcagcatgcataaggactatttcccacacccctatgattgcacccccaaccaattagcagcaaggacttattgcctaaaacagccccattcatcccccaaaccatccatgaaaaaccctagctttcaaatttccggggaagctgatttgagcaataataaaatacgtctcccatttagccaactctacatgtataaaactctttctctattgcaattcccctgccttgataaatgataaatcagctctatctgggcagcaggcaagaagaacccgttgagtccttacaatatccttctttctaccctcctctgcctaattactctgaatctactaactttttcactcagttatttttccactttgaagacaaaaagttagaaaaaaaaatgccttatgaaattagtccctcagaataaaccagctgggctttctttagccacctgtatgctttagtcaaaatctaagctcagaggcaatagtgaaaggctttcttatcccaaaggaaaactctcagaaatttgctgaagctatccacactgagtgtaggtatagaacatgctttgccctatttattcatgggcaccatcctgaactcagtaatctagcttttttcttttgaagctggatggggaagacacagatctagctgaattagttgccaaaatatgctatctggcataaagattattttgagagagttattttgagactctttgtaagagaaatttatatctacaaaggaagtctccatttataagcttgtctctctgcatcaggaagaaaagaaggactaaatcaccagacactcttaaccaatggagaaggagtttaagtaacaaaccttacctttgtttaaggtgctttttctggctctctgccattaagatctacattttccaccctgtctcctctaggacctgagggttatctctttgatatgcaaatgccagggagattactcaccagaagaagaagaagaaatagagctaattggaaattgagcaaataaaaaaatcttgttttttctcccagaaacagtgaaaagctttagccatcctttagataatcttaacttgttccatctgccagaaacacaatttggattcagaaattctttatgaactgtttttgtattattgtacctggcacatggctacagttttcaaatgaaaactgtgaaatctgcttctgtctgtattttatgtatgtctgtgtatgcatgtatgtgtaatatttttctacctctagagactatcctaaaattaacttataaagagctgtatttaattgccttaaagaaaaagcacttatacaaattaagtattttttaaactttcagaaaaataagacctagcgcaaatgttcttcaagttgatattgttaaaagaagaaacttcagccaaattaaacttaaagaagtttaattgagcaatgaatgattcacaaatcaggcagcctccagagttacagctgattcatggagactccagggatgcctcatggtcagaacaaatttatagacaaaaaaagggaagtgacatacagaaattagaagtgaagtacagaaagagctggactggttacaggttggtgtttgccttatttgaacacagtttgaacactcagcagtgtctaagtggttgaagtatggctactagaattggccaagactcggctattgttacaggaacgtactcctaaattaggttttcaatcttgtctacctgttaagttaggttacagttcatccacaaggactcaaatatagaagtacggagtccttctcaggctatcttcagttctctttaacagtatgatacgggataatcttcagtaaataaaaatttctttaagtttgttggattaactaaagcaggcatgtcttcagagttgtcaacattaaatataatacatacatacagtttttttctaccaggggttactaggcaaataagtttgttattgtaactagatgtttaagattataaaactgtcagtttaatctaagagcaaaagtgaaaatgtggtagctattttattaagtacagcggtaaagcaagtatatattaagtatagcagtaaagcaaaaaaacaaaaaaaaacaagtatttaacttttttttggtttttttttttgagacggagtctctctctgttgcccaggctggaatgcagtggcacaatctcagctcactgcaacctccacctcccgggttcaagcgattctcctacctcagcctcctgagtagctgggattacaggcgtgcaccaccatgcccggctaatttttgtatttttagtagagatggtgtttcaccatgttggtcaggctggtctcgagctcctgacctcatgatctgctcgcctcggcctcccaaagtgctgggattacaggcatgagccaccaagcccggccttaacttttttttaggttcttgcttttgtgatatttggctaacatacatatgctgtaaaaattgttaataggaaaatattaataatgagatgttgactagctttgtctgtctaatgaaatttcataagtcaattaaaattaagaacaattgaattatagaatagaattcaattgaattctattgaatacacttgctgaatacaacaattgaattgtaaatagaatagaaattataaatgaacttttcaatagtaattattttttaatacgggtacttaaaattgtgtcaacttcttaacaaaagaaatggaggcaaaattagtataaacagtttatttgggccaaatttgagaactgcaatgtgggagacacgtcttcaagttgctatgaatataaactccaattagcagcagttacaagcggttttttttttttaaagaaggggcagttctttagttgcatataaactattgattggctatacatttttttttaaccataaattccaggagcatgaacataatgggtgagggtcacatcccctgggcatggatttggggcaggatgtgacaaaaatctcatactcatgtctctctgggcctgataaattttgcatactttatatagttcagactcttctgagctacgtttctttctcttccttttggttgagtttttttttcttctgaaagtattgatgatcaacattttagatgtaagtttgtcccatgtcactggaagacttagttttagttagtctcatcccacattggaggaagagaggagagataaaatggcttaagaatgcagtgaagtctcaaggccaagttgattggcaacacaaagggacagggcaatggtatttcaggtcatctgcttacaaaggagctatggcatgttggatcatttctaagcatctagctatcattattttagtgtttttgttgattttggacatctagaagtgcaaagtataatcaatttgagaataaaagacatgatgcaaataaagacaattactaacaaaagccagatctgaaaaatgtttttatttccgaaggcgaccaaataaatatgttttctacttcttgtgctgatctaaagatcaatgtataggagatctccagtgatgagtttgtccactcaggcagagctgcctttttaaaataaaaattatgaatgcataagtcaatgtatttgaatttaactccacaagtattggttaacaatacagatatggtcgcttccaaggtgtttggagggagttttgtatttgatggcattccacattggaggccatgctatttgatgtcttcatctcctggaaccacactgtattgtttggacatatctatccagacagatgatgataaattttgcatatctcacatagttcagactgctctgggctacttttctttctcaatagcttctcattgttaacttatgcctgtagagttttgctaaactaaattagataatggacatttattaaatatttagatcatttccaaataacataaaatgctgaaacattaattgcttaacataagttaatctacttttggtttttattacaaaggaactaaatatatttacatctgttaaaaaacactttaaactgtactatgagaaagaatatacttctatagaaattataaaatggtatatttatagatttaccattttatggaataccccataaccgttcacaatttcttatttcctagttttcactagaaattgaagttactaagagttaacaattttaactaatatagagtagttaaaaagactaaaaataataagggagataactatatgcaaagaaagtaagacatgtttttggtaaggaaagccataaggtataaggatgtgcttttttttaaggaaaaggaagaataatttggtctagtttggaggttatttaaaggttgtttcagaatgaatgaaagataaaatctaaatggatacaaaaaggaagagagatgacacacacacaaaatgaatgactcttgtatggacaagttggctagaactgaatgtattataaggttttaaaaatgagtcttgaccaagcactgtggctcacgcctgtaatcccagcactttgggaggccaaggcgggcagatcatgaggtcaagagatcaagaccatggtgaaactccatctctactaaaaatacaaaaattagct

SEQ ID NO: 94051 - DNA, 14495 bp, Homo sapiens
tgcagtgagccgagatcacaccactatattgcagcctggtcaacagagtaagacttcatctaaaaagaaaaaaagttacatacacatccttttgggagaagagagaacactacatggtaccaaatacctacctcccaccccctgaaaaaatcacaccaaaaaggacacagctaaataataaaaacattcagctgctgaaacacagcaacattaagccacctcattttctttgcccaatgctggcagcatacccaatccctcatcctgtaagaagggatcgtacaatatggggaggtgacatctcatcaccatggaaaacagagctgtagaatcagaactctttagaggaataggtgagtccagatcaggggtagaaaaagtacaaggtgagcctggaatgtttggttgtgccagaaaacaaggaagtgttaaagactcttgggaacatagcgaaaggacaaaggagccagggtcaaaggtcaatatgaggatcaaaatgcataatgatggtaaaggattatgacacacttgctttttaaaacttttaattccatgatttcatagtaatatcaaaaggagagagaagcagatgttgtgaggccctactccacatcccctcagcctacctgaattctcttgcagttgtcaacagttactaacacccagacctgaaggcctatgtttctctcctctgtctggggtctttctcaagaaccacctacagtgcatggctgctgggtgacatagtttgaaagctggaggataggtatccctgggagaagcagtcaaccaagggatgatggaatcgggaagattcggaaccatttcatgtggtttctcagcgcggcttcattgagaatgagtcccagttgccaacagcaaaatgttcaatatacaatatatcccttattggcttttctccctgccctgtgtcactcgccctgctaactctgtgttttctggtatcatctcccacataacctacccacgcccaggtttcttgtgcagagtttgctttggaggggacatcaaaactgaaaaagttaaagagcatagagaaaagaagaaaggctaaacacctcttatagaaaaatgctaactaatatgtaaaaagaaatgagagaattaggaagattgccattttacaaccccaatgtgaaagttgattttagcaagggccattaatttacgctaaaatcattgagtgaaaggttaatggggaacaagatattcacatggtctcaaagtattaacccacagattacttaatgattacaaggagatatacctgctcagtggaaagatctagtcaccaccttgtcagatcactaggctggggtggttttgtggtggcttagcctcagagatgatggggagaagtggctgcttacccctgaagcaagaaacactccagcagtagttctaattccattatcatgtaggaccttggctgaaactgtacctcatgtgggcaacagtgagtggggcacagtattggatccttctctggggggagcacagctatgtggattccaggcagctccctcagctgggtttagtgcctatgaggactgcaggggccccagtggtgaggcctgtacctgtccaaggtgttgatgggggttgctggaatccccttacttaccacctcaccataaggggaagttctccttcctatttgatgccggctgggggatacagtggtggaggcctggcatttcctctcattctctgttctctaagtggcatcccgagtttctgtgctcaccagggtttctattagtcctctgatacactctagaactctccctgttatttttgtgaaaatatagttgcttattagttgttctggctgtctttgtgaggaagatgagtgctagggacttctaatagaccatgttgctaacattactctcctcaaagctcgttctaagccttaaacattccctctaaaagacattaggttatttctaatatttcaatattatgaatatactttgtgttttaatttcatacacatccttatttacttagaatatttgtaattcattctttttttcagggggaggggatggagtctctctctgtcgcccatgctggagtgcagtggcgcgatctcagctcactgcaacctccaccttctgggctcaagcaattctccctggttcagccttccaagtagctggggattacaggcacccgccaccaaacctggctagtttttgtatttttagtagagacagggcttcaccatgttggccaggctggtctcgaactcctgaccttaggcgatccacccacctcggcctcccaaagtgctgggattacaggcgtgagccactgcgccctgctatttgtaattaattctaagaattctttgtgtagaattcttacctaaataatagtttcttcttcataagtcaatcattcctgtcgtttcatggttcctcctcagacccacttcagggcagattcattttgtccaacttcaacttcactttctctgctattcaggagtaatctagtcatcttcttttaacttgttagaaagcagtatgtcttcttaaggcatcagttccttaagtcctcatgacatggccatgcattctttttcctaaaactgtatttattgacatctgcacagtccaagtgatgtaggaaaatatatgtatttatttattacatgattacctgatgatgttatcctcataaaatgttgagacattgtaagttgaaggtaccccatctggacagtagaaatttctgttgtaaaagccggtgatgaggagttcgagacgagcctggccaacatggtaaaaccacatctccactaaagatacaaaaagtagccgggcatggtggcacatgcctgtaacccctgctactcgggaggctgaggcatgaaaattgcttgaaccctggaagacagaggttgcattgagccaagatcacgccactgcactccagcctgggcaacaaagcaagactctgtctcaaaaaacaaaaaaacaaactggtgatgattgttcccaagccagggagctgcacaggtgagaggaaagaaagctttttgtccaagttgccctctcatagcctagacaatgctctctgtcctaggatgcaaccactaccacctcaattcccccagtatgcacgtacacactagttcaaaacaatcctttatctatccaggagcttcttacagtttgcttgttatttcctggattcctgtagtttctttaagtttgaacttaggggaaggagtcagcagtcaatctctttcaccatattcatcaaaaaatgccgttaagactgggcttagtggctcaggcctgcaatcccaacacaatttgggaggcggagacaggagaattgcgtgaggccaggagttcaaaactagcctgagcaatatagcaagatctggtctctacaaaaagttaaaaaaaaatttttttttaaataccgttaaacacattacaacagtgctataacaaaggactggggcatgggttaaaagagaataaatgaataaatgaattaaacaggagtgcccttgcacagggcaaaaagtcaaatagtgttcagggcttattataagaaagagcaattctggccagatgcagtggctcacgcctgtaatcccagcactttgggaggccgaggtgggcggatcacgaggtcaggagatcaagaccatcctggctaacacagtgaaatcccgtctctattaaaaatacaaaaaattatctgggtgtggtggcgggtgcctgtagtcccagctacttgggaggctgaggtaggagaatggtgtgaacctgggaggcagagcttgcagtgagccaagattgcaccactgcactccagcctgggcaacagagcaagactccatctcaaatttaaaaaaaaaaaaaaaaagaaaaagaaaaagaaagagcaattctttggcctatcacattctaccacaattcccagaacccctaacattcaactcattcagatttttcttttggaacttgctttgtatttctaaacaaagttttgaaactcttatttcctgatttttcaattttagatgttttctgttggctagagagggagatttattgtgaagctaataaaggttaagtttcagagtccctcattttcatgggccctctccaaggccctattcttagccattgaatttggaattttattttcttacggagcattcagctggtgctgtggctcatgcctgcaatcccagcactttgagaggccaaggcaggaggatccctttagcccaggaattcaagaccagcttggggaatatattgagagccctgtctctactaaaaataaaaataaaaaaatattagccaggcatggtggtgtgtgtctgtggtcccagctcaggaggctgaggcaggagaattatgccattgcactccaacctgggtgacagagtgagactctgtcttaaaaaataatttttttaaaaaatttggccgggcacagtggctcacacctgtaatcccaacactctgggaggctgaggcaggtggatcatgagatcaggagatcaagaccatcctggctaacatggtaaaacccagtctttactaaaaatacaaaaaattagccaagcgtggtggcacgcgcttgtagtcccagctactcaggaagctgaggcaggagaattgcttgaacccaggaggcagaggttgcagtgagccaagatcaggccactgcactccagcttgggagacagagcgagactccgtctcaaaaaaaaaaaaattatcttaaaagcatcctccaaatcatgtatgcccccggccccataagccctgaatccacccttgatttactaactactttggatgatgagggtttagctaacttagatcgtagcccttgcaacacacatcaatacacaaacatttccccttcccggtttcccaaaatgtagtcaagctattaatttttagttcatttatcatgttttagcctctaagggccctttcttgttatcttttctacattagcctgttctttgtcttatggatccaatattcgatctctccagcaatattgtaggggttgtcttattttgtttgttggttggttagttttttagtttagttttattttctcaattgtctgtttccttttaagttccttttccctcatggtttgttttggcctctctcttatattggagactttcctaaaatgggtggtcatccaaccatatttaagaatgaggcaccaaagctggacatagtggtgcatgcctgtagttctagctacttgagagactgaggtgggaggatcgcttgagctcaggagttggaggctgcagcaagctatgattgcaccactgcattccagcgacagagcgagatcctgtctctaaaaaaaagtaataaaataaaataatttaaaaataagaatgaggcacttaaaagctaatcagaagctcaggttggggagttttctaaatggtgagtgtggtaggaaacctgaaaggtagcacccagtgatcctcacctcctggtattcatgcctgtgcaacaaaaggattaaccttgccccaagaagtatctggcctttactctcactttctgggaggtaatctctaaactcttggaatgttctttgtttacctgggggccttgggccatgccagatggtctatgctaactatgtgatatatggtaggggctctgaaccatgcattgtcagctcaacctcaggagggggttggacatgaaggccagccacacaggcagtcagccacgtctacatgaccaataaaaattctggacaccaaggcttggaggtgcttccctggctgggaatattgcatgtgtattatcacacattgttactgtgagaagaatagctccactgggagaggacaactagatgctctgcatttaaaactctcctggggcacagcagctgcacatcctggggctcctgacctctttgcgtttgcagtgtagcccaaatcggtcagcactggaggacctcagcagccatgttgaagccccatagtgaagccgggactgccttcattcagacccagcagctacatgcagccacggctsacacattcctggagcacatgtgccacctggacattcacacaccacccatcccagcctggaacactggcatcatctgtaccattagcccagcttcccaatcggtggagatgttgaaggagatgattaagtctggaacgaatgtggcttgtctgaacttctctcatggaactcatgagtaccacgtggagaccatcaagaacatgtgcacagccacggaaagctttgctgctgaccccatcctctaccggcctgttgctttggctctggatactaaaggacctgagatccgaactgggctcatcaaggrcagcagcaccatggaggtggggctgaagatgggagccactctcaaaatcatgctggataacacctacatgaaaaagtgtgacgagaacatcctgtggctggactacaagaacatctgcaaggtgatggaagtgggcagcaagatctacgtggatgatgggcttatttctctccaggtaaagcagaaaggtgctgacttcctggtgacggaggtggaaactggtggttcctcgggcagcaagaagggtgtgaaccttcctggggctgctgtggacttgcctgctgtgtcagaggacatccaggacctgaattttggggtcgagcaggatgtcgatatggtgtttgcgtcgttcatccgcaaggcatctgatgtccatgaagttagggaggccctgggagagaagggaaagaacatcaagacaatcaacacaatcgagaatcatgtgggggttcagaggtttgatgaaatcctagaggccagtgatgggatcatggtggctcgtggtaatccaggcattgagattcctgcagagaaggtcttccttgctcagaggatgatgattgggcgttgcagctgagctgggaagcctatctgtgacagtgatgtggccagtgcagtactgaatggagccgactgcatcatgctgtctggagaaacagccaaagyggactatctggaggctgggcgcatgcagcacctgattgcccatgaggcagaggccaccatctaccacttgcaattatttgaggaactcccacccactggcgcccattactagcgaccccacgaaagccaccgccgtgggtgccaacgaggcctccttcaagtgctgcagtggggccataatcgtcctcaccaagtctggcaggtctgctcaccaggtggctagataccgcccacgtgcccccatcattgctgtgacacggaatccccagacagctagtcaggcccacctgtaccgtggcatcttccctgtgctgtgcaaggacccagtccaggaggccagggctgaggatgtggaccgctgggtgaacttggccctgaatgttggcaaggcccgaggcttctttaagaagggagacgtgggccgggctcggtggctcacgcctgtaatcccagcactttgggaggtcgaggcgtgcagatcacgaggtcaggagatcgagaccatcctggctaacacggtgaaatcctgtctctactaaaaatacaaaaaaatyagccgggcgtggcagcgcgtgcctgtagtcccagctactcgggaggctgasgcaggagaatggtgtgaacccaggaggcggagcttgcaatgagctgagatcgcaccgctgcactccagcctgggcgacagagcgagtctccgtctcaaaaaaataaaaataaaaataaaaagaagggagatgtggtcattgtgctgaccgggtggcgccctggctctggcttcaccaacaccatgcgtgttgttcctgtgcggtgatggaccccaaagcccctgctccagcgcctgtcccacctcctttccccgaaccatccattaggccaacaacgcttgtagagctcagtctgggctgtaatgtggcactggtgggctgggacaccagggartaagataaatgccttgctgaaacatggctgtgtttacagcctgctctggcaggacagcccagagcctggctgcccatcatgtggtcccacccaatcaagggaagaaggaggaatgctggactggaggccccaaaagccagatggcaagaggatgacagcttcttttcctgtgtgtactctgttcagttcctttagaaaacagatgcccagaggactcccaacccctggtctggggtcaggaaacagccagcgagasttaggggccttagggcacaggrcagttcttccatttaagtactctggcctgacccttacttgcttccccaaacccctgggcctccccaatttgcgcctgtccccaccctccactcagctgtcctgcggcaaacactccaccctccaccttccattttcccccactactgcagcacctccgggcctgttgctatagagcctacctgtatatcaataaacaacagctgaagttaaaaaaaaaaaaacaaaaactctcctggacactgtcctatgtgcctcttcagtgagtcctgtgagtccttctaacaaattgtcaaacatgacagtgtctcagggaccccaagcttgcagttggggtcagaaatcatggtgctcttggggattycctacatttgtaatatctttatgtagtcatgtctcctttagtatgggctggacttagggacttgcttctatcaaataaaatatgacagaagtgacaggatgtccattttaagattagtttataaataagattagtcttccattgtgggtgctctcttttgtgttgcttgccctgggagatgacagcattcatgtcctgaggtggccctgtggagacgcccactcatcctgtgatcaataaccacacataattgaggttggaagcggatccttaccccagttgaatcttcacatgagactgcagccctggctgataacttgactgtaatctcatgagagaccttgagccagaagtgcccagctaaaccatgccctgattctcgacctggacaaactgtaagataataaatgtttgttgttttaagccactatatttggggtaatttgtcatgcactgggctacaatataaggtgatctggtagacctatgtattggatatccacaaatgtttttatctggaggtctttattttctagagaggttcaatttcttcagaaaagaactttccaatctcccaggcagcatacgcctggctgcatgagttcagggtccagagctggagaaaagaaccaaattttcacgcgttctcttctttttagcccctgtacaaacccctgttatctgatgcacctgatgtacctaagtctggagcccttcccggatcctttatctggagaggttgttgcccagttatgcccagctggaaaagggacctgatgagtctaactgctttgtaaatacactttcaacaattttccttgtttaaaacctagatccttgttctcaccttttaaagtaaccggtgctactcacaagaataactccagaggatatgaatctaccatgcaagagaaagctacaaaacttttaggagataataaaaaacaaaacctttatgacctcaggatggagaaagatttcttaatctagtttcaaaaagcattagttataaagaaaaaaagataaattagtttacattaaatataagaacttttgtttatctgaaaacatcattaaaagagtacaggccaggcgtggtggctcatgcctgtaatcccagcactttggcgtggtggctcatgcctgtaatcccagcactttgggaggccaagtcaggtggatcacttgaggtcaggagtttgagaccagcctggccaacgtggcgaaaccctgtctctaccaaaaatacaaaaattagccaggcttggtggtgtgtgcctgtagtcctagctattcaggaggctgaggcgcgagaatcacttgaacctgggaggcggaggcttcagggagctgagatcacactagtgcactccagcctgggcgacacagtgagactctgcctcaaaataaaataaaataaagtaaaataaaataaaataaaataaaaagaaatgatccctgaaagtatagtcttacaaattgttgttatatccaaacaacagaatactatgcttccaagaaaaggaactaaagatacatgcaatatagtgaatgaatctcgaaacacatttttaaataaaacaaaggacatacaaaagaataaatacagtatgattatattatataaagtccaaaagtaggcaaaactagaaatgcatacatagattgtaaaactgtaaaccaaaaaaagcatgtaattactataaaagtcaggatagtggctatctgtataggggaagagattatgatcaggaaggaatgctagtaatgttgtatttcctgacttgggtagtgcttaatacgtatgtgctttatcattattgattattctgtaattcgtattttatgtgtttttctgtatgtctgttgcagttaataattaagaagtttaattctgcttttcgttgctgttgtttctgtcattcttctgctatttaaatgctgttttatttttctgatagttatttttataatgacacctttatatattacctttcctcttaagcaatatttattgcttccctgccatgcacaacatgagctgtaacctcttcctcctgcctaacctccttctctttctccattcaattttagtaaataacattacctgactcagggcttacctttatacatttatccttctacttgacttgccacccttaaagatacctttagattctgagcaattacagaggaagctttcaagacttatgctacttccaaattatctctcctttctctcatgtatttttggcagttcaagttttcctacattgtcatagtatgtaacattctgtcatcctcattcgcacctttatttttcctattcctagccttatttttgtttgttttagatctggagttaaaaacatttgattcttactctcagtcctgtagctaaagtttgctcattttctcttggctggctgtagtttgctggtagtttcctcaagagtattgtttatatagtcaatattctgtgggttcttgctagcttaaaagtgtttgtcagccaggcgcagtgcctcacgcctgtaatcccagcactttgggagtccgaggcaggtggatcacgaggtcaggagttcaagaccagcctggccgacatggtgaaaccccatttctactaaaactacaaaaaattagccggacgtgggtggcaggcacctgtaatcccaactagtcgggaaactgaggcagggaattgcttgaacctgggacgtggaggttgcggtgagccgagatcatgccactgcactccagcctgggtgacagactgagactctgtctcaaaaaaataaataaataaataaataaaaataaattaaaaaaaggtgtttgtctctaacctttatgtttgaaggacagtttgtctgaataaaaagtctttccatcagtttctttccttgagtacagtgaaggtattactcttctgtgttctggtattcagtttcactgttgggaaacctatgccaatctgaatttctttccgttttaaaggactcatcttaggccaggtgtggtggctcacgcctgtaatctcagcactttggcaggccaaggcgggcagatcacttgaggtcaggagttcgagaacagcctggccaacatggtgaaacaccatctctaccaaaaatataaaaaattagccacgtgtggtggtgcacacctgtaatcccagggaggctgaggggcacacctataatacttgggaggctgaggcaggagaatcaccctgattcaaaataatcctgcccctgttaactctattttaaagacctttgttaggcagcaacatgaattgaaaaaaaaaaaaaaaaaaacaggccagctgtgatggctcatgcctgtaatcccagcactttgggaggtcgaggcaggcagatcacctgaagtcaggagttcaagaccagcctggccaacattgagaaacctgtctctactgaaaatacaaaaattggctgggcatggtggcatgtgcctgtaatcccagctacttgggaaactgaggtaggaggatcccttgaccctgggaggcaggggtggcagtgagcaggactgcatcactgcactccagcctgggcaacagagtgagactctatctccaaaagaaaaaaaaaactgtgtttaaagtctttgtttttcttggcactagtgtctctacttatattttatcccaaacacctttcttttgcaatccaatttctttattataagtgtttggattaacagcatcttactaatacatatattatttattattatataattatatagttcaatgtttgaaatctctttgtgaatttagaaaatacaatctaccaccatgataaaagaatcatcatagtcctttaaaactgtatgtagatttaaatatatatatatatatatatatatatatatatatataataaattttttttcttgagatggagtctcattctgtggcccagactggagtgcagtggtgcaatctccactcactgcaaccacacccagcctagatttatatttttataatgttgtctaggttctgaaaaatcagcttgtaaaagccacagcatttatagattacagtatatttaagttacaatttcatttcacattagatgtagatattctttataagtagtctcaatatatttataagtagtttccagactttttttttgaagtaacttccagaggtttttatcccttcataaaacattcatccttgcacggattaaatacatgctcttttattatttggggcaactacactgccagtgacagtgtaattgtcactagaatagaaaaaaagaaaaacaattacattttcttctgaataacttgatggaaagggtccaagaagattcccctgggtgcaatattgtttttccaaaatgtaagtagggcaccaaataatgggtatcctccagaacctttgtttagccaagactagtaacacctttttatttgtagtaacacatttttagctgcccaagtttgttagtgaattgctcttgccaaagtaatcagcaggaattttctgcttagagcagcactgtccgatagaatatgatgtgcactacatctatagtttaaaattttctagttgccacatataaaaagtttttaaagaggtgagatcacgctgggtgcggtggctcacgcctgtaatcctagcagtttgggaggctgaggcaggcagatcacttgaggtcaggagttcgagaccagcctggccaaaatggcgaaaccccatctctactaaaatacaaaaattagccaggtgtggtggtgggcacctgtaatcccagctacttggaaggctgaggcacaagaatcgcttgaacctgggaggcagatgctgcagtgagctgagatcatgccattggactccagcctgggtgagagagtgagactccatcttgattaaaaaaaaaaaaaggtgagatcaattaattaattgtaattatgtattttgttcaattgggtatattcaattcaatatacccaaaatatcattctgctatgtaattaatataaaaatgtattaatgaggtattttacattccttttttgtactaagccttcaaaatccaatgtgtattacagttgcaccacatctcaattcatactagccatatttcaaatattcagtagccacataggattagtggccaccaggatggacagtagagacttaattagcttctgcattaccttagcccacaacgaagacaccactcctaaaaggtctggattgtctcccagagtgagaagctgaaaataccttgacttctcaaattcaatttgccttggaatagagtacagagagtacagtatgctttcccattaaagggttcagcattcaaaaaattcttttttttttttttttttttttttgagacagagtctcactctgtcgcccaggctggagtgcagtggtgcgatctcagctcaccacagtctccatctcccgggttcaagcgattctcctgcctcagcctcctgagtagctgggattacaggtgaccgccaccacacatggctaatttttttgtatttttagtagagatgaggtttcaccatggtggccaggctggtttcaaactcctgacctcaagtgatccgcctacctcggcctcccaaagtgctaggattacagacatgagccaccatacccgacccagaaaatttatttccttcttcccttctttctctctttctctctctctgcctctctctctctccctctctctttctctctttctttcttgagacagggtctccttatgttgtccaggctggtcttgaactcctgggatcaagtgattcttccaactcggcctctcaaagtgct

SEQ ID NO: 94052 - DNA, 19755 bp, Homo sapiens
  misc_feature (1)...(19755): n = A,T,C or G
gaagtcaagcaagaaagacaaagaaaaaatagactgcattaaaaaaacatgtattatgagctgggcgcagtggctcatgcctgtaatcccagcattttgggaggctgaggtgggcaaattacttgtgtgggcggcaagccacccaggcgacgaggcaagagacagaggacacaaactgttccagcataataaaatataaaacaagaacagttataccagatatagatcttaaatatgattatatatatcattaattagtttgtagcaattactttttattccaatattataataatcctcgctctataatcatagcctaggaaaaaccaggccatacagagataggagctgaggggacatagtgaggtgtgaccagaagacaagagtgcaagctttctgttatgcccggacagggccaccagagggctccttggtctagcggtgacaccagcgtctgggaagacgcccgttgccaggcagatggtggtctagcggtagcgtaagtgtcaagggaaaacacctgctacttagcagaccaggaaacggagtctccttttccccggaggagtttagagaagactctgctcctccacctcttgtggagggcctgacatcggtcaggcctgcggaccgtggtctagcagtagcgtaagtgtcaagggaaaacacctgctacttagcagaccgggaaagggagtctccttttccctgcaggagtttagagaagactctgctcctccacctcttgtggagggcctgacatcagtcaggcctgcccgcagttatccagaggcctgtctccctgtgatgctgtgcttcagtggtcacgctcctagtccgccttcatgttctatcctgtacacctggctctgccttctagatagcagtagtaaattagtgaaagtactaaaagtgtctgatatgcagaaataatggcataagctgtctttctctctgtctcctctccctctctgcctcggctgccagggagggaagggccccctgtccagtggacacgtgacccacgtgaccttacctatcattggagatgactcacattctttaccctgccccttctgccttgtatccaataaataacagcgcagccagacattcggggccactgccggtctccgcgcattggtggtagtggtcccccgggcccagctgccttttcgtttatctctttgtcttgcatctttatttctacactctctcgatgccgcacatggggagagacccactgaccctgtggggctggtccctacagcttgagtctaggagttcaagacaagcctggccaatatggcgaaaccccatctccacagaaaatacaaaaatgagccaggcatggtggtgcatgactggagtagtcccagctactccagaggctgaggtgagaggatcacttgagcctgggaggtggaggcttcagtgagccaagatggcaccactgcaccccagcctgagcaacagaatgagaccccgtctcaaaaacaaacatgtattatgaccatatattcatcagagttcagagaaacagaagcaatgggagattttatatagatatatatggagagagagagagagacatatatgaaactggtccatgcaatcatggcggctgaggctggggagtcccacaatctgttgtctgtagctggagacccaggaaagctggaggtgtaagttccagtctgaggttaggagattggtgtcctagctccagcagtcagacagagagagaaaacgctctcttccttcacctttttgtgctattcagtctctgactatgatgctcacctgcactggggagggtcctctgctttcctcaatctatccattcaaatgctaatatcatctgaaaacaccccaaagacacacccaggaataatgtttaatcaattatctgggtaccccataacccagtctatacttaaaattaaccatcaagactatatatgcatttatagaaaaatatatatgaaatgtatctaaaaacattttaaatttaaaagtcagccctccctcagagtggtctcaccccacggacaagggagtttaccctccaactcccatcaggcattggctgagagttgcttcaggaggtgttaactcgtcacacttctggccttccagatgcataggctggacatactcctgcagccaggggaagccccaaacaaagttgcaggtatatgtgtgagataccttgatcagggatgtgggggatgggggcagagcactatcagacatgttgcgtttttgcaacaatgggcataagaaggatatttgaaaatctttaagcacactattagtggttaagaagacctattgatttttggatgcccatcatgtgctgaataccatgcccgacccccaagtgcatcatctctaggtgttaccatgattgtccctatgataaagcaacccatgtgtctccgtgaattctgcaaactctgctgaaaatggcaaaatggagttggggtcctctgtgctggtgacatttagaatggaaagcaagtgctattttgaagatgactcagtctgaggaggcgctagttttctcaagcaaacacttttgtaacacccttccagccaaaactctgagctaacgtagaagggtgagtcctgtctttctctttgctatccactttgcatgtggcccagcagggatggtgacattgctgagggtggacaatctatacctgtcctcttctctcccaaactccaaaaatgtaagcgccctaagggcaagaggtctttatttattttgagacagggtctgtctgtcactcagggtggagtgcagtggtcggctcactgcagcctggaactcctaggctcaagcgatcctccctcctctgcctcctgagtagctgggaacacaagcgagggccaccgccacgcctggctaattaaaaaaaaaaaattttgtagagacagagtctcgctctgttgccgaggctggtctgtaactcctgggctcaagcgatcctcccacctcagcctcccagtgttgggatcacagccgtgagccactggaccaaaaaaaaaagaaacctaatatacaaaacaatggcagggtgcggtggccctagcactttgggaggctgaggcaggcggattgcaggcaggagtttgaggccagcctgagcaacatctttttcttttctttctttattttattttatttattttttgagatggagtctccgtctgttgcccaggctggagtgcactggcacaatcttggctcactgcaacctctgcctcctgggttcaagcgattctcccgcctcagcctcctgaatagctaggactacaggcagatgccaccacgcccagctaatttttgtatttttagtagagatgtggtttcactatattggccaggctggtctcgaactcctgccttgacctcccaaagtgctgggattacaggagcgagccactgcgcacggcctcttttttttccttctgagacacagtcttgttctgttgcccaggctggagtgcagtggcacgatcttggctgactgagtagctgggattacaggcggatgccaccgtgcccagctaacttttgtatttttagtagagacggtgttttaccatgttggccaggctggtcttgaacgcctgacctcaagttgtccgcctgcctcggtgtcagagttgcatgaaccagagcaactctatcttgaatagaagctgggtaaaatgaggccgagacctactaggctgcattcccagacggttaagacattctaagtcacaagataagataggtcggtacaagatacaggtcataaagaccttgctgataaaacaggttgcagtaagaaagccaactaaaacccaccaaaaccaagacggccaccagagtgacctctggttgtcctcactgctgcactcctaccagtgccatggcaacggcaggaagttaccgaatatggtctaaaaaggggaggcatgaataatccgccccttgcttagcagatcatcaagaaataaccagaaaaatgggcaaccagcattgagttcctttactttcctaacaaacttgctttcactttatggcctcgccctcaatctctttttttttttttgagacggagtcttgttctgttcccaggctggagtgcagtggcctgatcttggctcactgcaacctccgcctcctgggttcaagcaattctccagcctcagcctcccgagtagctgggattacaggcgcgcaccaccacgcctgcctaatttttgtatttttagtagagatggggtttcatcatgttggtcaggctggtctcgaactcctgacctcaggttatccacctgcctggcctcccaaagtgctggactcgccctgaattctttattgcacgagatccaagaaccctctcttggggtctggatggggacccctttcctgtaacactgggattataggcgtaagccaccatgttcagccacctttgaggcaggaaaatagggtctggaggcagggaacatataaggctgattcacacttcagttatgacaggaaatatcctctccttagggagtacaccctaaatgactttgtaactttacttcatcctcttcatttacatatggcatatcccaaataaccaatggaatcctccaaagggtatttaaactccaacaaattctgtaactgggcccttgagcacctatgctcagccggccccaacactggagtgtactttcattttcaataaatcgttcattccttccttgctttgtgcattttgtccaattctttttttttttctttttctttgagacagagtcttgctctgtctggagtgcagtggcgcaatctcggctcactgcaagctctgcctcccgggttcacgccactctcctgcctctgcctcccgagtagctgggactacaggcgcctgccaccacgcccagctaattttttgtatttatttttagtagagacagggtttcaccgtgttggccaggatggtctcaatctcctgacctcgtgatccgcccgcctcggcctcccaaagtgctgggattataggcgtgagccaccgcgcccagccgttttgtcccattattttagatgccaagaacctgtacaccctccaccggtgacaccttcacagttttgaggagtattcatggggtattttgtaaaatgtttctcaattgggatttgtctgatgtttttctcatgattagactggaggcagctgggattacaggtgtgagccaccatgcccagtctccaaaccctgtttacacaaaaattttaaaaaactagccaggcttggtggtgcgcgcctgtagtcccagctactagagagcctgaggtggatcacttgatcccgggagggggaggctgcagtgagcggagattgtgcctcgctggctgcactccagcccgggcgagagagccagaccttgtctcaaaaaaaaaaaaaaaaaaaaaaaaagcctaatatggctgagggcggtggctcacgcctgtaatcccagtactttgtgaggccgaggcgggcggatcacgaggtcaagagctctagaccatcctggccaacatggtgaaaccccgcccgtactaaaaatacaaaaattagttgggtactcgggaggctgaggcaggagaatcgcttgaacccgggaggcgggggttacagggagctgagatcgcgccactgcactccagcctggcgacagagcgagactccgtctcaaaaataaatatatacaaattaaaaaagcctaatatacaaaataaagctaggaatcttccctgagtcctcttgcctacggaatgaagtccacagacttgggggagcgttcgaacccttctaaggccacttcctttctccagcctctcgcgcccagttgactcccggcaacacctcccgccgccacaaggagacgcccgaggacttccctccgacaaagccaaaaacggtattgccacgtgacccgctccgcatacacgtgaccagcttcgcacccggtgggcgtcacgtgacggactcagtagaccgccactggctgtgcacgttatggggtttccacctagggctcggcctgaggcttgtaacactccgttttcccccgagtcacaggggcagtcttgcccctcgcagctgggtcgcggtgtctctcaaaggtccccctctacaggggcttcgtgaggcccgggcccacagggcgctcggtcccggaagtgacgtctcccagaggggccggaagtggcagtggagggagggaagatggcggaggtggtgagtccggtgcccggggcggggcggagggagccaggggaggtgggtagagcccgaggccccccagtagccgaccctggcgtcgcgctgtctccccagggggagataatcgagggctgccgcctacccgtgctgcggcggaaccaggacaacgaagatgagtggcgtgagtgacgttggggggcgggactaaggaacctgagggcgaggggcgggagtcaactgaaatcccgggatggggaggggcgtctggaattatggggcgggcgaggcgcagatactttgatgaaggggcgtggctcttagctgctccgagaggtacagggcggggcctggaaakgggtggcacttgtgactgaaggaggcttaggagagacctaagtgctggagcttagggatccggcctgggggtggagttcaggtcgtggaagggtggagtctcatagcctggcctgtctaaggcccctgtctatgctattctcatagccctggccgagatcctgagcgtgaaggacatcagtggccggaagcttttctacgtccattacattgactgtgagttctgggcctgaggtggggcatcagggtagggttgggggacagtctttggcattctgtcctgagccatccccactgctacagtcaacaaacgtctggatgaatgggtgacgcatgagcggctggacctaaagaagatccagttccccaagaaagaggccaagacccccactaagaacggacttcctgggtcccgtcctggctctccagagagagaggtggtgagtaggtcccccacttcaccttttctctcctgcctcctatttctcttgtctgttggcattaggrgctcctggatgggcaggaggcggctccctctcaccctgacttcatcttgcaaaggatgggggccaaattgcacatgtagctcccagagtccagtagctagtcctgtgtccttcagaaggcgagggtggggtttgataattttgaggtgagggacccctcttccccttccscrtcccactgccatccccgccccaraggaagaccctggacctatctctacagccggcctcggcgcaggccagcgggaagaccttgccaatcccggtccagatcacactccgcttcaacctgcccaaggagcgggaggccattcccggtggcgagcctgaccagccgctctcctccagctcctgcctgcagcccaaccaccgctcaacggtaccctcagcaattccagggaccttgctttcttctcaggtcccaccttctctaccttctgacccacctttgttggtttctctctgcagaaacggaaggtggaggtggtttcaccagcaactccagtgcccagcgagacagccccggcctcggtttttccccaggtgagttccccaaaccatctcttgttcycttcctctcttctactctctggtggcttttttcaggctcatttcacagccatcccttcttttcctactatctcggcagaatggagccgcccgtagggcagtggcagcccagccaggacggaagcgaaaatcgaattgtttgggcactgatgaggtgggtctggggagcagcagaagggaactgggtgaaaaggaagggatgcaggcagggtggagagttatttagtgatgagtttaaaaataaagaaggggtggtgggcagagctagtgttggtgggattaggagacaggcagaacatkgttcaaatgagtcattggggccgggcaccatggctcatacctgtaatcccagcactttgggagtccaaccaaggctggyggatcacctgaggtcaggagtttgagaccagcctggccaacatggtgaaaccttgtttctactagaaatacaaaaattagccaggcgtggtggcgggtgcctgtaatccagctcggaaagctgaggcaggagaactgcttgaaccccggaggtggagattgcagtgagccaagatcgcgctactgccctccagcctgggcgacagactgagactccatctaaaaaatggggtcattgggtgatcttttccacatcatcgatcctttagggtttcaggttttttatctggaaattggggatcatggtacctcccccttagggttgctgttaggcttgaaggaaacctgtcaaagggctgtgagctgtggtgtcctgctgagctgtctcttacaacctggtattttccactggccctgggcaggactcccaggacagctctgatggaataccgtcagcaccacgcatgactggcagcctggtgtctgatcgaagccacgacgacatcgtcacccggatgaagaacattgagtgcattgagctgggccggcaccgcctcaagccgtggtacttctccccgtacccacaggaactcaccacattgcctgtcctctacctgtgcgagttctgcctcaagtacggccgtagtctcaagtgtcttcagcgtcatttggtatgaggggtccagggaggctgccttcccagcaccctccacgttgcccttgttcctgatcctcctctcttccccagaccaagtgtgacctacgacatcctccaggcaatgagatttaccgcaagggcaccatctccttctttgagattgatggacgtaagaacaaggttagtgcttgagaggcagtgaggygctggggtgaatcaaatgacagcttcttcttgctcaggtaaacactgaccagtcaagccagcagatcagtccagcccatttttattgagttcctgctgtctggcaggtgctggtagccaggaatgagacagtctctgttctctgacagcttagtccatgggagagacagtcataccaatgacctctagctcccagtgtcctaagtgtcatgaaacagagggtaggttagcaggacccaaaggaggtggtcagcagagcttcatagagggttacctttcagccttggtggatgacaaagtggctgaggggatttcttgcagtggtgttctgaagagtaggcatggatgcacaaaggtggtctttgtgaaaggcagagatcattctggttgggaggcagaaaagggaggatgagggaaggctcgtacatgggacagagcttaggtgatgaagatgctgtgttaaccaccattttgtaattattaatgtggacctgggcatccaagtggcagtacccagcagcaggcggttaaaaagcaattcctgggctgggcacggtggctcacacctgtaatcccagcactttgggaggctgaggcgggcggatcacaaggtcaggagatcgagaccatcctggctaacacggttaaaccctgtctctactaaaaagtacaaaaaattagctgggcgtggtggcgggtgcctgtaatcccagctactcgggaggctgaggcaggagaatggcgtgaacccaggaggcagagtttgcagtgagccgagattgcaccactgcattccagcctgggagacagcaagacttcgtgtaaaaaaaataaataaataaaaagcaatttctggctgggcacagtggctcatacctgtaaccccagcactttgggaggccaaggtgggccaatcacttgagcccagaatttcgagaccagcctgggcaacatggagaaacccccaggtactcgggaggctgagttgggagaatcacctgagcctgggaagtcaaggctgcagtgacccacgattgcatgattgcaccactgcactccagcctgggtgacaggagtgagaccctgtgtcaaaaaaaaaaaaaaaaacccacaatgtctgaaatgcaggagaaatcgtgtgcagaagtaaagcagcaggattcataattttgctggggtaaaccctaaggcagttattttgttaaattccagaattccttaactctgttgtagagtagcagatcagttcccaggaggtgtgactgtggatgtagaatgttaggttttttaacagctagactcccaagactgttagatagggagtcagtggtcagagtctcactttggacacattagtttgaggagccgtggtcagagtctcactttggacacattagttcgttggctgctgttaaaaaacattaaaaggcagtggtctctcctggtcaggcttagaatggaggtgtgcggagcaaggcgggaaacttgcctgactgagcagggaggcactcagacaccatcacacatctggcacacaggcttttcaacactgaggagcagccctgcctaagctgygggctggtggagtgggtcaggcccagccagggaagaacactcatcacctagcagcctggggcatagcacgaacagtgaagctcctggttgaccctgaaccactggccaggctcaaggcgggatacccagagtggtgacaagccttttctcttgcagagttattcccagaacctgtgtcttttggccaagtgtttccttgaccataagacactgtactatgacacagaccctttcctcttctacgtcatgacagagtatgactgtaagggcttccacatcgtgggctacttctccaaggtcagtgcctgcccaagctgtccctgtgccctgtcctgagccagatcccttccctgacactcayctgtcccccttctccaggagaaagaatcaacggaagactacaatgtggcctgcatcctaaccctgcctccctaccagcgccggggctacggcaagctgctgatcgagttcagtgagtatgtgtgctgcggccagggggtagtggacccactatcggtgcctcacaggcagatgggccaggctactgtgattctcaaccctggctgtgcagcccagcctctaggggarccagccagaaataacagtggcactctcccggggttctctccgttcaggctgactgccctgcttatctggggtaggttctcagccccccagtttgctccttggccagggttctaagtgccactcagctttccccaaatctgacttacgtgmtcctgcctggagccatgggcagaaggttagtgagccgctggtgctgatgtatctggtaacgtgtgccatgatacgagtactggggcaaggaccagtggctaatgtccccagttgtcccctgagccttgcaggcaggtatccaaaatgctgtcagcagatagacrtaagcatgttgtccctcgctccttgtgtccagtgaggtcagtctcttaaagccagaagggactctgaacttcatcacacatgggctcttcagtgccctccccaaccctgaggccccttcttcccagcctcttactccccatcaccccccattctgtctgtctcaccactcacttggaataaccaagctctgacctgagaaacaaggaggaagttctagctgttgacctggtgaagacacagaggctttacctgatcaaggttatggtccattcgagaaattttattggttaaatgatgcccagatggggtcacatcctcagaacttctcagcctrgtagcacaagtggatgcttgaagaaactcagtcttggaactcagacagcaatggagacgggatgtgagtgggaccagcaaggggctaaggtccattatgagggtgaggaagggcttctrgaagtaacaaacatcccaggtccctgactggggagaatgaagacactgaccaagagatgtgaagccactcagggctgtgcagggtctgaggatctcactggggacggcctcccagcggccagctatcagcacgagttggagggaaagagccatggtgggggtcagtcacgtggctcccaggaatggtctccccgacttaggaagcaccttggtgcaccttttctccttgcatcctcacaaccacccagtcaggccactcaagtcttacagcaggtgacactcccaaggtcccagctaggaggactttgagaattcaagcattctcaggtctggattagagacaggaatctgtctccacttccttacatggctagacacagagcccgggakggcaaaggaaaattggaggccccttcttcccatgagccattttctctgcatcccctgcccataagccttcactggcctctgatcaccctcatggttgactgcagctgctcctctcagtgccctcatgccctccactgtgctcagcgcacggaaagagtgaatactcagttcttcctgagggaactgaggcacagagaagtggagggcatagaactgccaagtggcagggccatgataggaactaggcagcctgccttggcaacctgtgtttttaaatgttgcttatgttcatctgtgacctcttactcaccctctcctgctccattgctttaggctatgaactctccaaagtggaagggaaaacagggacccctgagaagcccctctcagaccttggcctcctatcctatcgaagctactggtcccagaccatcctggagatcctgatggggctgaagtcggagagcggggagaggccacagatcaccatcaagtgagcctggcgctgtctacctgggggtacatggcatggcttgtctgttcctgggctttctctctcagggctcctggggacagataaaggtcctcagggaacctgacctgtgctctcccacagtgagattagtgaaatcaccagcatcaagaaggaggatgtcatctccactctgcagtacctcaatctcatcaactactacaaggtagggaggcaggcaggggagacaggtgtgtgggatgcagagtgcagtcctctgtgggctgaccacctgctgaacccatctcctctgcccagggccagtacatcctcacactgtcagaggacatcgtggatggccatgagcgggccatgctcaagcggctcctgcggatcgamtccaagtgtctgcacttcactcccaaggactggagcaagagggggaagtggtgaccagacactgcccactgcagtgccaagacggcagcaggactggggctgatagcccaccccgcccccactgcagctcccacaaagcactctaagggagatggggctgaggacagctcaaaaaggagaggacaggcctggcaggggcccactggtgcccagcaccaaggcgagctccgggctcagaccaactccaaggtcagctggccacaggcccaggcctcctctgaagcagggaccagagggagccaggcagctgtgtacagtgagaagggatccggatgggggagctctgtacagagggctggtgattgtaaaaatttcttttgtaaagtagaagttggggstggggtgggtgctggctgcaaaaatttctggcttctcttacccctattgcccccggcaataaattgtttctatatgccagagccatgcaaagttcttggtggggagggggaaagggcccatgctggcttaggggctctaaggcgcccagactcacaggtgctgtgaagagctcctttattggggtgatggaatcggttccaaagagctggtttactgctgtgaagggatcgcagctttgaatttcaagctctggttctcagtcctcgggcacctgtgcgtgaatctgcaacaggagtcgcctctactgttggacttgtaagacagggcggcaagctggcccccatacccgaggaaggacccagctgttcagaataaccgcttctagacatgctaggaagagtggtcagggagctacgcttcccacacactacccagtagaatcctccaggctccgtctgcgcaattgtgctccccagcccatccacccgggggcaagacggaactcctcgtctactcaccgctgccgcaaggctgggccaagttaaggccccacgcactttggcatccgggccagggatggtctccagaccccacagggtgaagcggctgaagttggcagtggctccaatgaagcggtcctggggaaggggcctggctcagcatcgggactacagctcccgcccgcaccccctttcaaccctatccctttgctcacgaagtcccgctccagcggctcctcctcttggtcgtcagtcccggaatcccgcaaggggtctggcttccccatcgacaccttcttctcttctgtcaccatcacgtatcccacgaggccaggcggcaccgccacctcctctccccgtagacagcggccccgaaacgacacttcgagtcctggagcgggaggcgcaaagggcctcaggcaggacccacgctgggtcgagcccggagctgccctcccgccacctccggacggaccacgatccccaggagcccaggcgatgagaagcgcgcaggccggcgcgggggctgccgggagccgtagtccggccgcagggctcaccctcggggccctggcggatggcgggcgtgaagaagcgccccaccggggcgggcccgtccaccgcaacctcgcagggcagcagatgcagtgtggcgggtacggcgtcgcgcaatgtggcggagcgcaagtggacgcggtgcctctcgatggccgcttcgtcgccgctctccatcctccctcctacgcgacgccagggctcgcgagctgacactgaagctggcgnnnnnnnnnnnnnnnnnnnnaaagggggggagagggagggggaggatggagggggaagaatggaggggggaggaaaaggggaagagagaaggggggaagaaaaggggggaggagaaagagaagaaggagggggggggggagagaggggggaagaagaagagggagggcggggagaaagaagggaggagaaagaaaaaacgggagggggggggagggagaaagaaagggggggagggagagagaaaaagggggagggggagagggggaaagaagaggggggggggggaagtggaaagagggagaggggaagaaggaaagggggagggggggaaaagggaaggggggagggagaaagagggacagggggggggaaagagaggagggggggagagagaaggaaaaatggaggaaagggaagagggcgtaaggggaaaagggaggggggaaggggggggaaaagggggggcgatgggagataaaggggaatagaaggaaaaagaaggccggggggaagaggagggggaaaggagaaggggggcgaggggggaagtaccgtggttataaagtcctgactcttgttgtctgtcctttccccctccttccccctcccccctccccctcctccctgcctcccttccttccccccttcccttcccttccttcccgtccttccctctttctttctttttcttatttattattatttttttttgacagagtctcgttttgtcgcccaggctggagtgccaggcacggtctcagctcactgcaacctccgcctcccgggttcaagcgattctcctgcctcagcctccggagtagctgggattacaggcgcacaccaccatgcccacctaatttttgtatttttagtagagactgggtttcgccatgttggccaggctggtctcgaactcctgacctcaggcgatcctccagcctcggccttctgaagtacttggattacaggcgtgagacaccgcccccagccgggtttttttcttttattgtttttaatggcacatgtcgttgtaaaaatctaaaacgattctgaaaagtactctttttatattgattagtaggtaagttattcatttttagtttattagggacatcaacccttttcttaaatgcattgaaaatgttttatctgtggtctgtcttgcaaacctgtgtaaaggtgatttttgctggacaaggacttatttttgtggttgtttggtcttttagacaaggtctcactcgcctaggctggagtgcagtggtttgattggctcactgcagcctcgacctcccaggcttaatccatcccccatcctcagcttcctgtgtagctggaaccacaggcctgcgccaccacgcagctaatttttgtatttttggtagaggtggagttttgccatgttgcccaggctggtcttgaactcctggactcaagtgatctgcccaccttggcctcccaaatcacgctggaattacaggcgtgagccactgcacccaggacaaagactaattttttgtagtcaaatttatcaacacttttcagtcttttagatttcacaattttctctctttggtttctcagctcttctctaatgtttatttgttcagacacccaacttagatatattttttcaagttctcacataaaacaaacacaaaactggaaatttagatttaaattgcgtttaatttatacatccctgcacatctgggagctggccttggtattctgttgaatataaacaatttcagagaacatcagcatcggacaaggtcactctgtgaccgtgagggagcaagacagaaacagaaccactccatcgtcacatctgaatgctggcaaaggtgaacactgtccaaaccacaaaaggcatgaaacatccctctttctcccataagagagtgactgttgtttccttaccaattacagcattagcctccaactaatcttctctccttctgggcaagactcattaagatagtccgtcatagacatacccccacctctgacagcatccaagccagagagaagcctggcttccctaaaccctgactgaaatcactgaacatgggcacaaatcctcctataagtcctttctagcaccctcttattgaaattccccagagtgcaggagtaatatacccaatttgttcaactgcagatgtattcctggtgctctttcactagagtggcagattaatttagaaaaaggcttgctttagttttctatcaggaaagacataattcaatttattcacatctccttggatatctgtacagttgtgaggttttgttcatatataatagctattaatacatattgtaaagtttatttcttcttagcttatattaataattgtttctattaagaactgaggggctgggcatgatgattcacacctgtaattccagtgctttaggaggccaagatgggggaggattgcttgaagccaggagtttgagaccggcctgggaaacatagcaagactccgttcctacaaagaaaaaaatttttttaaacatgagtggggcacagtggcatgtgcctgtagtcccagctactcaagaagctaaggtgggaagatcacttaagccaaggagtttgaggctgccgttcgagtcacgattgcaccactgcacaccagcctgggttacggagggagaccctttctctaaaaaccaaaattggggcttttatttttttcattttattttctaactgattttctttttaatctatagcaggggttggcaaactttttctgtaaggggtcaaatagtaaatattttaggttttgtggactttatggcttctgtcgcagctactcaacttcaccgttatagcatgaaagcagccatagacaatacataaatgaatgagcgttgttgtgttccagtaaatctttgcagaaacagacaaggggttggatttgaaccacaggccatagttttcagaccccttgtctatagcaaacctgttgatttttatatgtccatttttaaactagatatcgactgaattattttgttcctaatgatttttattttattttaagatccccagaattagtcacctctctttcaaataataatttttacctcaccattacatcttctttttgttttttgttttttgttttttttttttcattacaccttgtaatttgttttcttttctaattgccttggccagtacttgcagaacagtctctcaaatgttactggtatcagaggacaacattgtctttttcctgaaactttcacgggagtgcttctgctgtttcaccaataatcatgaaactgccttttgacttgttatatatgtctcattaaagctgtactactaagagcttttaaaaattgggagtagatgttggatcttattttttatttttatgtttttggttttgcaagtttcctgtagtctggatattagtaattgcattcctatagtgtcaaggtaatctatacctgtattttctgtaattacatctagaagcttaattcgattctttggggaggggagagggcaagactacttcatgggtggttttgtgtttttccctctttttgtgaggttagcagccatagatgatcattgcctagatcctttaattcattagaggttaaaacgcgtgtgtacgcgcacacacacacacacacacatatttttgggacagagtctcacctggtagcccaggctggagcgcggtggcgcgatcttggctcactcagctcaacctctgtctcccgggttcaagcaattctcctgccttggcctcctgagtagctgggattacaggcgcatgccaccatgccaggctaatttttgtatttttagtagagatggggttttaccatgttggccaggctggtctccaaatccttacctcaagtgatctgctcccctcccttgggctcccaaagtgctgggatcacaggcgtgaggcatggtgcccagcctaaaactgatattctaagtcctctcatttcttcttcatttactagctgaaataggtctataaagaaaaactctccccatcagccatttgattgcctgttggtacagtgaggataagaaagacaaaataattaggccgggcacagtggctcacacctgtaatcccagcactttgggaagctgaggtgggtggatcacttgaggtcaggagttcgagatcagcctggccaacacggtgaaaccttatctctactaaaaaatacaaaaattagccgggcgtggtggcgcatgcctgtaatcccagctactcaggaggctgaggcaggagaactgcttgaacccgggaggtggaggttgcagtgaactgagatcgagccactgcactccagcctgggtgacagagcgagactgcatctcaaaaaaaatccttttattttccagttcttaaaataatgatttgttgccctagcatattccaatggtgaccttttaaaaatgttaaataaatattaaataaataaatataaataaaaataataaataatggattaacacttttatgtttcacataattgtggttattattcttactgaggtgcaaatttccccatcttctgccagtggaagcctcttcaagttatctcctgaatctttcgatatgaccctagtgatcttttatacatatctttgttttccagtaccacaagatgttcctggctcatcttgtacatttcctgccccagacttggaattatacatctctccaaagatcgctggttcccttcagtgggaaatgatatttagtaatccaatctgatactagatgtattcattgctactgagttagcctttgtttctagatatttccagtggacaaagctaggaaatacgcatttttttcctctcctttttttttttttttttttttgagacagagtccgctctgtcagccaggctggagtgcagtggcacaatctc

SEQ ID NO: 94053 - DNA, 64382 bp, Homo sapiens
  misc_feature (1)...(64382): n = A,T,C or G
caggtggatcgcttgagctcaggagtttgggaccacttgcccaattgcctgggcaatatggcaaaacaccatttccacaaaatacaaaaaaattagcctagagtggtggcacaggcctattgtcccagctattcaagaggctgaggtgggaggatcacttgaacataggaggttgaggctgcagtgagctgagactgcaccattgcactccagcctgggtgacagagtgagaccctgtctcaaaaaaaaaaaaaaaaggtgttgaatgcactgcctgcagcggacactgtcagttgcctatcctaggccattccctcctttttccttgataatggaattctgacaagatccaggtggcaatgatgccactccaggggtgactgggaggaaattaaattaaagtttgtctgaggaaattaaagcgctcctgttcctctttgttgaggattggttaggggtggtcatgtgacacagttctattcagccaatgaggcacaagagaaaatctgctcagaggattctgggaaagatttccctccagcataaaatgagaggtctacaaagaaaactcctcttctgtccctgccttatcttcctgcttttccacatctctatgtgaggccatgatttcccaggcaacggcaatcattcataaccagaactgaacaagccaacagtgagaagacaaccttctgaggctagaagtgtggaagcccttgctaggcgagcttccgcgtcaaccagcatgccacctctcgatggcttgatgtctgcaataaatgcacatctttggagtttcagcagatgttctgctacctgcagcaaaagtgtcttcccttacacattgtgacttaatgatattgttacgggctgaattgtgttctgtaaaattcatacgttgaagccctaacaccccatacggcagaatgtgactgtatttggagatagggtcgttaaaaaggtgattaaattaaaatgagtccattaggttggcccctgatccaatataattggtctcattacaagaagaggaaatttgattgggcacagcagcttgtgcctgcagtcctagctactcaggaggctgaggcaggaggatggcttgagcccaggtgtttgagactgtagtgagctatgnnnnnnnnnnnnnnnnnnnntatgaagacacagcaagaaatcacacctgctaccttcatctcccaaacaacctgataccttgttttttttgtttgtttgtttgtttggttttttgtttgtttggtttcgcttttttgagacggagtcttactctgttgcccaggctggagtgcaggggtgcaatcatagctcactgcagtgtcaaacacacctggctggagtggtgggatctcagctcactgcaacctctgccttgccacttcaagcaattctcctgcctcagcctccccagtagctgagattactggcatgtgccacgatgcctggctaattttgtatgtttagtaaagacggggtttcacgatgttggccaggctggtcttgaactcctgacctggggcaatccgctcatcgaggcctcccaaagtgctgggattacaggcatgagccaccatgcccagccaaaacctgataccttgatctcagactcctagcccctagaactgtgagaaaaaaaaattctgttgtttaagccacccagtctgtggcatttgctatggcagccctagcaaacttacacagatatctattgttaggcttaatttattaccaccattagttttttttgtgggggtatttttgtatgtggtgtgtgtttgtttgttttgagatagggtctctgtcgtccaggctgaagtgaagtggtgcaaacatggctcactgcagcctcaaactccctgagctcaggcgatcctcccacttcagcctcccaagtagctgggaccacaggtgtttgccaccaccaccactgccagctaatttttctatttttcatagaggcaaggtctcgctgtgttgcccaggctggtctcagacttctgacctcaagtgttccatcagcctcagcctcatcctcccaaagtgctgggattacaggtgtgagccaccgtgcccggactccatttgtattttcaaaaacctttatcttactatctaactgtcccttgggtgcagttggaacctggataagagagcttgccctttctctgatataagaatgcagtgacaccaacccaagacccaagactggtcctctcagggcccatccacccattacttcattcagtaaaaatccagcagacacccatcgtgcgttggagctgtgtagaattgtcagagtaagtactttgaagtcgggctgcctggctgtgcctcctaatttgagctgctcctcactttgagaccgagggcaagcaagttatcttccctgtactctctgaccttgagaatggtggtaggaacacacatctcataggactgtgtaaggccagggtgagccagtgcaggtaaactggctcagttgcttttctgaatatgcaaagattgacaagaagggagatcacagtcatgttttgactcatatatatatatatatatatatatatatatatatatatataaaaatatatatatatatatatatataaattattattttttttttgagacagattcttgctctgttgcccaggctggagtgcagtggtagaatctcagctcactgcaaccttcacctgccaggttcaagcaattctcctgcctcagcctcccaagaagctgggattacaggtgcacaccactataccaggctaatttttgtatttttagtagagacggggttttaccatatttgccaggctggtctcgaactcctgacctcaagtgatctgcccgcctcggcctcccaaagtgctgggattacaggcttgagccaccgcacctggcatgtcttcactcatatggttttgttgtaacccttccaacaagccctgtgacacagatactgccacccccattttgccgagtgaagtgaggttcagagaagtcacgtgacaaaagctgcagggttgctgaatctcagagctgaggtccaaacccaggtcttctgacctctaagccctgagctctttcttgcaccgtggtggtgtcgtttttttcccagagcccttagagtatgccagacattcccatgtaatcctcacaagaacgcagcttccacaagctaggaataaagaactctgacatggatacacgtgtttagaccacacagcgggataaactggcaagttattggaggtcttactggaaaggtggttcatagggaaatgccctctaagagaatgggaggaaaaggtaaaggcattgtttggtaactgtctgagaccaggtgcttttgctagaccctatacaataggcttgaggtgctaatatcgttatgcctcactttatagttgaaaaaaaggaggctcaaagagggtagaatggcccagacacacagaaaatggacgagctggccaggcgcgatggctcacgcctctaaccccagcactttgggaggccaaggcgggtggatcacttgaggtcaggggtttcagagcagcccggccaatatggtgaaaccccatctctactaaaaatacaaaaattagctggggatggtggcaggcacctgtaatcccagctgcttgggaggataaggcagaagaatcgcttgaacccggaaggcagagactgcagtgagccaagatcacgccactgcactccagcctggggtgacagaacgagactccatctcaaaaaatataaaaggatgagctgcaatttttttttttctgagttggagtctcactctgtcacccacgctggagtacagtggcaccatcttggctcactgcaacctccacctcctggtttcaagtgattctcctgcctcagcctcttgagtagctgggattacaggtgcccatcaccatgcccagctaatttttgtattgtatttttagtagaaacgaggtttcaccatgttggccaggtaggtcttgaactcctgacctcaggtgatctgcctgccttggcctcccaaagtgatgggattataagcatgagccaccatgcctagccaatcagctataatttaaatttagtttcaactcaggcatgtagcatctttcctctgggtcaggtcttctcaactcctgctgcacacatgtaggtactttttattatttttttaattattattattattttgagacggagtcttgctctgtcgcccaggctagagtgcagtggcgcgatctcggctcactgcaagctctgcctcctgggttcacgccattctcctgcctcaggctcccgagtagctgggactacaggcacctgccaccacgcccggctaattttttgtatttttagtagagacggggtttcacggtgttagccaggatggtcttgatctcctgacctcgtgatccgcccgcctctgcctccgtatgttttatttttgagataagggcttgctttgttgcccaggctggagtccagtgctgctatcacagttcactgcagcctcaacctcccagactcaagtgatcctcccacctcagcctcccaagtagttgggactacaggcacgcaccaccatgcccagctaattttttttggtagagacggagcctcaatatgttgcctaggctggtcttaattcctgggctcaagtgatcctcccgccttggcctccgaaagtgctaggattacaggtgtgagccactacacccggccaacataaaaaaaaaaaactgatggctgagatccaccttcagagattctgcgtcagtgggtctggagtgaggcccagcactgatacatttagtactgccaatcaggtgattccaatgtgtgccagggcggaagcacagccagaccacacagctgtcaggaatgaacggcccaaggtgctggcatgtgctctcagcccagaccggaccatcattattctcagctgggttgcataaaggccagtgccactgccttttcttactctacccacagagcaaatgactggttctttctttaagcaaaatacgttaagatgagttcattaacttcaatcagtgcatatagcaagttgaatacgaatttcaggcaatggcaacacacgaagatacacgaataatagggaagctcagatcaaattcaggcattgttttgccctcttgataggccaggaagttgaagtttctttttaactattctgtttacttatttattttttgagacagagtctcactctgtggccgaggctggagtgcagtggtgccatctcagcttactgcaatgtctgcctcacaggttcaagcgattttcctgcctcagcctccttagcatctgggattgcaggcgtcttccaccacgcctggataatttttgtatttttagtagagacaggatttcgccgtgttggccaggctggtctcgaactcctgacctcaagtgacccgccaaccatggcctcccaaagttctgggattacaggcatgagccaccactcctggcccgtcttttttactattctttatagtttctgagaaaagcctttggttcccgttcgttattttttaaataggtacatgaaacattttatgtctccttcttccaaaaagaaaataatgaattaagtggctctttatgtatgattattagaggggagcatcggggcctttastaaaaacaaaacaaaatgtaaaacctttcccgtctctgctgaaggggttccctgctgtgcagcagacattcagtgatcacagagcttagctcaagtttctcctaattcccagcacctctgattcccagcatctcttcttgttctgatcataaacaactccagctcttggattacgtcgggcaacataacagcaggcacggaattctctctgcttatttagaacctagtctgaagcaagcttttttttttttttggttaagtcaaaagtgaaactggagagggaaagctgagggaacaataagaggattaaagattagctatgacacatggcttggaaattaacctttaaccaaacatcttataagtaacgccagcgcagcttcccttgtgaatgtaaagagatccagggctcttggagagggacaagtgagagccagccaaaaaggaaaaagcaaaggcagaaacggcatcaggagagacagagatgtgaaggagggaaggagcaggagagcaggaaggaaacgcaggaggagggagcagcatctcctgtgaacacagaggagcacctgtttgctgttaaaatcgatctccctcggcaccctgagcaatggatataatatttggcaggaataggaaagaacagctggagcctgtgagggccaaagtgacaggtgagcattctgataaacactgggctctttcttctatttattttattattttttttttttttgaggcggagtctcgctctgtcgcccgggctggagtccagtggcttgatctcggcccactgcaacctctgcctcctgggttcaaacgatcctcccaccacagcctcccgagtagctgagattacaggcacccaccaccaagcccggctaatctgtgtgtttttagtagagacggggtttcagcatgttggccaggctggtctcgaactcctagcctcaagtgatccacccacctcggcctccgaaagtgctaggattacaggggtgagccactgcacctggcttcttccttgtgtttagatggacactattttttcctgatgatataagtaatactaattgtaaattacttttggaaagtctggaaaacagtacagagaggggacacattttctgtgaaaatctaggtattcttttacacattataactccgtttgcaaagggaggagagtcagtctcactgttcccaggaaaaaagcattggaatgccccagtgggtacatagacaatgggattaatctgcaaactgctgcctgtctcagatgcatgatgtatttgtgcaaatgtatgcattctaaattagtttcaaaatgcttagaggggcgtgcatgagctcccacgcatgcacatccaccacgcacacttgcaggggattgcagagtctgatgtgattttctctcaggaactcacaggtgtgagctcctgcagagcctataggagtaggaccttctatcctttagaggctctgtgtttcgcttaatcttttatatctctttttcctcctcttttgagttgccactttcctggtaccatttcgactctaaagggcagttcctggttctggactcccgggtccccagagtggtgctcgctcagttttaagaacagctgagtcagctcaggcctgcaggcattttcatctgctagatggactggaattgttcataaggagaggacaactgtgagtgattttcgtgagaacatcagattgaagcttttcaactgagcaattgccttgggagtcttttgaaacaaaaaaaaaatagcttttatgtatatattttcctggttacaaaggtaaggcacaatctatagctatcaatctgtatatatatatagctgtatgtatattaaattatatataaattaattaggagtgcaaatgagaacatggaaggaaataaaatcagctgtattttgaaatctcttaaccactattaatatttgggtctatttcctttaactttttaaaacataggtagatcaattgatagattactatatttgtaaacagtttttcaaaaagcaaatgtatactattacatttttattttttttctcaatttgactgttcatctgtacatattttattttttaaaaagacaccccacggccaggtgcggtggctcacgcctgtggtcccagcactttsggaggccaaagagggtggatcacttgaagccaggagtttgagaccagcctggctaacatggcgaaatccctctctactaaaaatacacaaattagccaggggtggtggcatgcacctgtagtcccagctactcaggaggatgaggtagtagaattgcttgaaccccggaggcagaggttgcagtgagctgagatcgtgccactgcactctggccttggcaagagtgagaccctgtctcaaaaataaataaataaaaaaaaaccaggcaccccagcctggccaacctggtatggtgaaacactgtctttattatttggttggtgcaaaaataatcgcggtttttgccattactttcaatgcatttaattttaattttttttttttttttgagaaggagtttcactnnnnnnnnnnnnnnnnnnnnnnnnnnnnnnnnnnnnnnnnnnnnnnnnnnnnnnnnnnnnnnnnnnnnnnnnnnnnnnnnnnnnnnnnnnnnnnnnnnnnnnnnnnnnnnnnnnnnnnnnnnnnnnnnnnnnnnnnnnnnnnnnnnnnnnnnnnnnnnnnnnnnnnnnnnnnnnnnnnnnnnnnnnnnnnnnnnnnnnnnnnnnnnnnnnnnnnnnnnnnnnnnnnnnnnnnnnnnnncctcagttgatccgcccgtgttggcctcccagagtgctgggattataggcgtgaaccaccatgcccggcctgaaattttattttaaataaaaatacaaaaattagccaggcatggtggtgcatatctataagcccagctcctcaggagactgggcatgagaatcacttgaacccaggaggcagaggttgtagtgagccaagatcgcaccactgtactccagcctgggcaacagagtgagactctgtctccaaaagaaaacaaaaaggcacctatgatacctaccttttcgtgccctggaatattttgtaccctttacacctcatgtttaatgactgcatgaaatccttggaaatgttagaaaacatgaattctagaacacgagaggctgagtgagccccaaagatcagcagcggttctcaaaggggtggccccggacctgcagcataagcatcacctgggtgctgggtagaaataaacatccttgggccctacccagacccacggggtcagacacttggggggtggagctcagcaagctgtgtgttcacaagccctcaggcgattccaaaggtaagaaccattcctctacatcaagcctmcctattgacagatsggaaactgaggcagaggggcagtgacttgccaaggccaggcagcctgcagagaacaggcctcctgactctccgtccaggcctgggttgagcctaatcagttggtgacatccatgggcaracagctaactaaaarctgtgcctgggttgacacgtccatgcagggagcacatgcaaaggttttggcttkgtaactggctgtgccgacacacgtgtgttctgagacctctttggcaacttaagcatttcctgcctcagtgttcttttctgtttgatgaatgtagcctggcacctcccacatagggttgctgcaacgattaagtggtttaatccacctagaacacagtggctggtgtatgaatgcatgtaagtgttcttgtcctatctagggctttaattatattctcagatgcctctctccctgctctttctcaagcctgccccctctcctgtgccctgggtgcctgtgcctggcgccacgattatgtaggtgcccaaggcaagagacttggctgtctttttttttttttttttttttttttgaggcggagtttcactctgtcgcccaggcaagagtgcaatggcgcaatcttcggctcactgcaatctcctcctcctaggttcaatcgattctcctgcctcagcctccccagtagctgggattacaggcacccaccaccacacccagctaattkttgtattttcagtagtgacggggtttcaccatattggccaggctagtctcaaacttctgacctcgagtgatccatccgccttggcctcccctagtgctaggataacaggcctgagccaccgcgctggcctcggctgtcatttttcagtgctccactgcacatccccctgtatttagtcaaatagaggcccatcagttctgtgtgttccatctatctttgttcatccatttctctccatccctgtggaatccccgggtcctctctctggtcttcctgcctctctcagggaatttcccagtccacaatccacaccatgggtggagacaaccttcgaagctccaagttcctattccatttataacaggggtccccgaccctcgagccgtggaccagtaccagtctgtagcctgttaggaaccgggccgcacagcattacggcccgagttctgcctcctctcagatcggtggcattagattctcatatgagtgcaaaccctactgtgagcgtgaaccctgtcgtgaactgcacataggagggatctaggttgtgcgctccttataagaatcgacccctcaaccccaccatccatggaaaaattatcttccacaaaaccagtccctggtgccaaaaagtttggggaccactgatctatatggaatccagaacaggcaaatccataggaaagaagatgggtgcctgccaggggctggggtaaggggagaagggggagtgacagctaatgcataagggagatggctttttggagtgatgaaatgttctggaattaggtgatggttgcgcaacrttgtgaatacactagaaccccctgaactgtacattttaaaatgatgagttttatctcaaatttttttaarttgcagaaaatatctggtcctgtccttccctattataaccatcaaaggtgccccattcttctgaggattagatcaggacccttagtgtgatcctgttgacctttgtcccctggcccccgttatttctgcagtttcattgcttacagttttcttgcttgaaaatgacggtccagtcttactaaacagcttgcccgtctcctggtcttgatcattcattcattcattcattcattcatttatgagacggagtcttgctctgtcacccaggctggagtgcagtggcgtgatctcagctcactgcaacctcccccttccgggtttaagcaattctcctgtctcagcctccagagtggttgggattacaggcacccgtcatcacacctggctaatttttgtatttttggtggaggcggggtttcaccatgttggccaggcttgtctccagctcctgacctcaagcgatctgcctgcctcacctcccaaagtgctgggattcaggtatgcctcggcatgcccagcctcctggttttggtcttcttgttttgggttcctccagaggcaagaattcaaggctaagtggtttatttggcacgtgatcccaagaaacatcaggaggaactcagggaaacagagagaaggaaaccaataaatggggcattgtcgagccattggctgctgaggccattggagctaaatcctctgggtatgacgtaaaacatgcctctcgtgatcccaactgagggcaaggcaacggcgggatttgtcccccaattctgcatccatcactgggtgagagcagcttccaggggcattacctatccgaggtgcttcctgctcttcctgcatgtaggcaaagcctgccccacccgcagtcagaaccaagcactcaggcagggagctgcaggcatttgcagaaagcagcctgtaggaagggacgaacgctgagaggacttgggtggaggcaccaacagcattttctgcagcaccctgcctctagagcagggctgtcccctagaaagagaacctatgccacacgtgcacttttaaattttctggtagaaacattgaaaaaagtcaaaagaagcaggtgaaattatttcagtggtatattttaacacaacaaatccaagatattatcagttcaacatgaaatcaatatttaaaaaattgctaatgagatggttcacttttgttcatactaagtctttgaaatctggtgtatatttcattcttatagcacatgtcatttcagaccaaccacatttcaagtgctgatagctaccataytggacagtacagctctagaatgttctttccttttgcctttgtgaggcgaatacctactctccctcaagacttagccaggttgcctcctcyaggaagctgaccacaccctcctgctctcagcccaccygagggctgttctgtttcacaaagaacctttttctacgtctgtagcgttgcccctatctttttttttttttttttttaattttttgagacaaggtcttgctctgttgcccaggctggagtggagtggtgtgatcactgcagcctggagctcccaggctcaagcgatcctcccacctcaacctcccaagcagctgggactacaggcatatgccaccacaatgagctatgtttttttggggggtttttttgacacagagtttcgctcttgttgcccagactttagtgcagtggtacaawctcgrctcrctgcaacctctgcctcctgggttcaagtgattctcctgcctcagcctyccgagtagctgggattacaggcgctcactatgacgcccagctaatgttttgtatttttagtagaggtgggatttcatcatgttggccaggctggtcttgaactcctgacctcaggtgatccacccacctaggcttcccaaagtgctgggattacaggcgtgagccaacacacaaccagcattgccttgaccacagtggatcttgggtgtctgtttattcatctgtctcttaatggtcagtaggcagtttgaggacagggasagtgtctccatcttggtatcctcagtgctagccaactgcccaacacattatacactttctggaaatgactgtagaataaacgaacagatgcaaggagtggtactgggaccacaactctcaaattcctttccatgaccatttcttccagcattttggtttgcaggtggaaacgggaaactaaacattctctcttttctcaggcaagattccagcatggctgcagggaaccctgctccgcaaygggcctgggatgcacacagttggggagtccagatacaaccattggttcgacggccttgccctgctccacagcttcaccatcagagacggtgagaacacccacgagtgtgctgccactgctgcagcaaaggaccccaaatgcagtgccttaaaacagcacaaatttattcttttagggattggaggtcagaagtctaaatcgggtctcactgaactgaaatcaaggtgttcatagggccacattcagttctggaggctctaggaaaaatatccacgttcttccgttttctatcttctagaagccgcttttccttgacttgtggctcnnnnnnnnnnnnnnnnnnnnnnnnnnnnnnnnnnnnnnnnnnnnnnnnnnnnnnnnnnnnnnnnnnnnnnnnnnnnnnnnnnnnnnnnnnnnnnnnnnnnnnnnnnnnnnnnnnnnnnnnnnnnnnnnnnnnnnnnnnnnnnnnnnnnnnnnnnnnnnnnnnnnnnnnnnnnnnnnnnnnnnnnnnnnnnnnnnnnnnnnnnnnnnnnnnnnnnnnnnnnnnnnnnnnnnnnnnnnnnnnnnnnnnnnnnnnnnnnnnnnnnnnnnnnnnnnnnnnnnnnnnnnnnnnnnnnnnnnnnnnnnnnnnnnnnnnnnnnnnnnnnnnnnnnnnnnnnnnnnnnnnnnnnnnnnnnnnnnnnnnnnnnnnnnnnnnnnnnnnnnnnnnnnnnnnnnnnnnnnnnnnnnnnnnnnnnnnnnnnnnnnnnnnnnnnnnnnnnnnnnnnnnnnnnnnnnnnnnnnnnnnnnnnnnnnnnnnnnnnnnnnnnnnnnnnnnnnnnnnnnnnnnnnnnnnnnnnnnnnnnnnnnnnnnnnnnnnnnnnnnnnnnnnnnnnnnnnnnnnnnnnnnnnnnnnnnnnnnnnnnnnnnnnnnnnnnnnnnnnnnnnnnnnnnnnnnnnnnnnnnnnnnnnnnnnnnnnnnnnnnnnnnnnnnnnnnnnnnnnnnnnnnnnnnnnnnnnnnnnnnnnnnnnnnnnnnnnnnnnnnnnnnnnnnnnnnnnnnnnnnnnnnnnnnnnnnnnnnnnnnnnnnnnnnnnnnnnnnnnnnnnnnnnnnnnnnnnnnnnnnnnnnnnnnnnnnnnnnnnnnnnnnnnnnnnnnnnnnnnnnnnnnnnnnnnnnnnnnnnnnnnnnnnnnnnnnnnnnnnnnnnnnnnnnnnnnnnnnnnnnnnnnnnnnnnnnnnnnnnnnnnnnnnnnnnnnnnnnnnnnnnnnnnnnnnnnnnnnnnnnnnnnnnnnnnnnnnnnnnnnnnnnnnnnnnnnnnnnnnnnnnnnnnnnnnnnnnnnnnnnnnnnnnnnnnnnnnnnnnnnnnnnnnnnnnnnnnnnnnnnnnnnnnnnnnnnnnnnnnnnnnnnnnnnnnnnnnnnnnnnnnnnnnnnnnnnnnnnnnnnnnnnnnnnnnnnnnnnnnnnnnnnnnnnnnnnnnnnnnnnnnnnnnnnnnnnnnnnnnnnnnnnnnnnnnnnnnnnnnnnnnnnnnnnnnnnnnnnnnnnnnnnnnnnnnnnnnnnnnnnnnnnnnnnnnnnnnnnnnnnnnnnnnnnnnnnnnnnnnnnnnnnnnnnnnnnnnnnnnnnnnnnnnnnnnnnnnnnnnnnnnnnnnnnnnnnnnnnnnnnnnnnnnnnnnnnnnnnnnnnnnnnnnnnnnnnnnnnnnnnnnnnnnnnnnnnnnnnnnnnnnnnnnnnnnnnnnnnnnnnnnnnnnnnnnnnnnnnnnnnnnnnnnnnnnnnnnnnnnnnnnnnnnnnnnnnnnnnnnnnnnnnnnnnnnnnnnnnnnnnnnnnnnnnnnnnnnnnnnnnnnnnnnnnnnnnnnnnnnnnnnnnnnnnnnnnnnnnnnnnnnnnnnnnnnnnnnnnnnnnnnnnnnnnnnnnnnnnnnnnnnnnnnnnnnnnnnnnnnnnnnnnnnnnnnnnnnnnnnnnnnnnnnnnnnnnnnnnnnnnnnnnnnnnnnnnnnnnnnnnnnnnnnnnnnnnnnnnnnnnnnnnnnnnnnnnnnnnntgctggggttacaggcatgagccaccacgcccggcccatcccatttctattttaatttattttaaaaaaataattaaacataaaaataaaaccactatctgtggctttgaatcccagctccaccatcctagctaacatgcacctaaactgtgtaactttggccaaggtactgaccctgtctgtctcagtctcttctgtaaaatggacatatcaatagcgtatctcatggagctgctattagatctaaacgaatgtgtaaacagctctgtattatgtctcgtgcacaacacctgctcaataagcatttgttcttaatttcatataactactggccagtcgcgatggctcacacctgtattcccagcactttgggaggccgaggcgggtggatcacctgagatcaggagttcgagaccagcctggccaacatggtgaaaccccgtctctactaaaaatacaaaaaattagctgagcgttgtggtgagcacctgtaatcccagctacttgggaggctgagacaggagaatcgcttgaactcgggaggcagcggttgcagtgagctgagattgcaccattgcactccagcctgggcaacaagagcgaggctccctctcacaaaaaaaaaaaaaaaaaaaaaattatataactattaatttcttttgagctagtcagcaattattttttgaatgtgtactctatgccagtgccttgctctaacatttacacatgaatagagacacgatgggtgaaaagcgcgagctctgagtctgcaataccttgcagattttactgtgactcagctmcagaatgggtggttccatattttgctgacagcactaaatcttaatgattcctttcttttctaaacagaagtycccaatgattcttggaaataaataytkttctggatgaggaacatagaaggtaaatgcaccagtggtggccgggcgcggtggctcacgcctgtaatcccagcactttggggggccgaggtgggcagatcacctgaagtcgggagttcaagaccagcctggccaacatgggaaaatcctatctctactaaaaatacaaaaattagccggatgtggtggcaggcaactgtaatcccagctacttgggaggctgagataggataattgcttgaactcaagaggcagaggctgtggtgagttgagatcatgccactgcactccagcctgggtgacacagtgagactccgtctcaagaaaaaaagcaccagtggttttccttccatgaggcmttgcttccccaggctgccagctcctccatggtctctttctttcttttttttttttttttgagatggagtctcactccgttacccaggttggagtgtggtggcgcaatctcggctcactgcaaccttcgccttccaggttcaagtgattctcatgtctcagcctccggcgtagctaggattacaggcacatgccaccacatctggctagtttttttttctttttttgagacagagtctggctctgtcacccaggctggagtgcagtggcacgatctcggctcattgcraactccacctcccgggttcacgccattctcctgtgtcagcctcccgagtagctgggactacaggctcccaccaccacgcctggctaattttttgtatttttagtagagacggggtttcaccgtgttagccaggatggtcttgatctcctgacctcgtgatctgaccgcctcggcctcccaaaatgctgggattacaggtgtgagccactgtgcccggccccggctaggtttttttgtatttttagtagagatgggggtttcatcatgttggccaggccggtctcgaactcctgacctcaggtgattcaccagcatgggcctcccaaagtgctgggattacaggcgtgagccaccgcgcccggccgagtcagttttattcayaatctggcaytggctgggaaaataggaaacccaggaattacacccaatgatttgttttccctccatctttctcttagacctaggccagcgtctgagggttcatgccccattctgcttggcaggcatcattttgccaatctgtggcatagggtgggaaggcccagagtgcggggagcctgcctgaattgtggtgtcttcatcatctagcatggggcctggcccagaggggcgcttggaaactgtatatggagctgagatggtacagtgaggcagtcrttgttttggtagacagaggcaatactttcccartcaaactcttcaatatttactacaaagagggtttgctgggccctgccccaagtgtttcatgtccatccacaactcagccctccccgtcactcctgaggaggatagcctggggactaccacagttttagagataaggaatgaagtcccagagaggccaagtcacttacccagaagcacacagctaagagttggtaaagstcagacatagacrcaatactctctaacttcagaatcccaagtcctaaccattgtgcaattcagccctgtttccccttcccaccagctcctgcctccccatctctccatcccaatcctctcagtgctgccagcttgccaatgctggtgtggcatagcctggcttcatctctcctctcctctaggactctccgtggcaccccattgtctaatggtgggaagatacaccagaaatgttcagttccactctagcgggttcagaagagaacacgtggggaagttggggtccctgataagctgaaaacaaagccaataactctcaaaaagtggtttgtgtgcctcctttctcaataaagcttttttttttttttttttttgagatggagtctcactgtgttgcccaggctggagtacagtggcacgatctcagctcactgcaggctctgcctcccaggttcaagcgattctcgtgcctcggcctctggagtagctaggattacaggcatgagccaccatgcccagctaatttttgtatttttagtagagatagggtctcgccatgttggccaggttggtctcgacctcctgacctcaggtgatccacttgcctgggccttccaaagtgctgggatgacaagtgtgagccaccgcgtctggccattcagtaaagctttgaatcctgaaagctgcacagggcttgagtgcatcatagtcctcaaagatagcgtttgtgtttctaacacacttcccaggtgaccccgagccctctgaggtttgacaatccctccacaatgggcctctagcctggctgcccaggcctaaccaaaaccatgttattaatactaataatcagaagaaccatgggctagtgaatagccttctgtacctttttaaagcacccaggtgattccagtgtagatgcaggttaggtgcttaagaccaaacatctaacttagagaaaagactttggagcaagaaacaaaaaggcagaaaatagcttgtggccttcagcagaggccagtagaaattaatgctctaaaaaaaaaacaaagagggaccagaggttgtggttcatgcctataatcccagcacttttagaggctgaggtgggaggatcccttgagcccaggagttcaagacaagcctgggtaacatagtgagacctggtacctaccagaaaatcaaaaagttakccaggcgtggtggtatgcacctatagtcccagcatcttaggagactgaggcaggaggatcacttgagccttggaggcagaggctgcagtgagccgagatcacacctctgcactccatcctgggtgacagagtgagacttcatctaaaaaaaattaaaaaagaaaaacatgtaaaaaataacaaagatatgaacaaaaaaagcagagtacagagggagaagctgggtgaagggtacaagaacactcctttctgtacatctaaaattatttcaaagcaaaaagtttttacaaagcacgcatagaaatgagtgattccaagtctccctcattaatgatatctgttaattttccgataaaattaacaggcaaagtcattgtcccaccaggatttgaacattggaaagtttcttttatatatacccacacacacacacacacgcacacacacacacacacatatatgtgtgtgtgtgtgtgtgtgtgtatatatatctatatcttcccttcttccccaaaatatcaaacttgacctagttctagaagatcccaggcaggagcacgtctgttggcgtatgtcccttcagaaggaatgtggctaattgggctctcctgaaagcagactgctggggaatgcatggaggctccttctgtaatctcaacctcaaagtccagggtcagccttgagtaattccagacacctactttcctgtggtcaccaggcactccatgctctggggctggatgtttataggaaatgggcagcctgttcactacccagcctgggtgtttatatttctttctttctttttttttcttttcttgtgtgtgtgggtgtgtgtttttgttttgttttgttttgttttgttttttgagatggagacttgctctgtcacccaggctggattgcggtggcatgatctcagctcactgcaacctctacctcccaggctcaattctcctgcctcagcctcccgagtggctgggattacagacacccggcaccatgcccagctaatttttatattttcagtagagacggggtttcaccatgttggtcaggctggtcttgaactcctgacctcaggtgatccacctgcctcggcctcccaaagtgctgggattataggcgtgagccacagcacccagccaatatttcaagtgaacataattcaacatttcaggtcaagcaccttagccaatgccttgtgggtggtgactcccagcaacagtaaccagtgaaagacaggctggctcaaaggggagatcagggtggccttaagtgggcctctgtctccatgtagcatgtagctgaggaccagtgagtatgtgtggccttgctcacccacagatgagtccgcctgccacccggattttcttggacaatgcagtttcaacagcctttgtttacgaagtgcatgctgggagtcaatgcgcaggaccccttacatyaccacatctcrtttaaaactgcccacctcaccacttgaggtcaggagttcaagaccatcctggccaacatggtgaaaccccctctctagtaaaaatacaaatattagccaggcatggtggcaggcacctgtcatgccacctactcaggatgctgaggcaggagaactgcttgaacccaggaggtggaagttgcagtgagccgagatcgcactactgcactccagcctgggtgacggagcaagatgttgtctcaaatataaaaaataaagataataaaactgcccacctagaaggggaggactatgtgattcccagcttccagtcaaggagactgaggctcgatgagattaagagacctgcccaaggtcacccaacctggatgagatgaaacctagagccgaagccttgatcactctgtctactgcatctcaatactctacgcagcttttcttgagcacctactatgtgcacagtgctttgcaagcctcaaatgtcacgtgactctgcaaggactgtgtcacgatcctcatgtcatagtggaggggacagattcttgactgttaccaaggtcaagtgcatggttggtacatgatgaagccaggattcatatccatgtggagattgagcctccttagcaacaggaatcctggccattctgctcattgttatattttcactcctggcccatcagggcagttaataaataatggttgaaagcatgaactcagggcctggtcagccccaaagctcaggctcctaaccgttcctccatatttctttctgctgcccaggaataaatctccccctacagaaatatctcagtgaggctgggcaccgtgcctcacacttgtaatcccagcacttcaggatgccaaggcgggaggatcgcttgagtccaggagttcaagaccagcctaggcaatatagcaagatcccatctctacaaaaaataaaaaattagccaggcatggtagcacgcacctrtagtcccagttacttgggaaactgaggtgggaggatcactcgagcctgggagaytgaggctgcagtgagctgtaattgcgccactgcccttagcctggtgacagcaagaccctgtctcacaaagaaaggagaaagaaatatctcagtgacacttattcacacagtaaccacccctgaaaagatgtttgcataaaggctagatgattgtctcttaggaacacaaataacctcctgaagactggaggaggaactagcaggtctttcatgatctccctcaattttattttattgtatatttttttctttgagatagagtctccctctgtcacccaggcaggagttcaatggcacagtctcagctcactgcaacctctgcctcctgggttcaagcaattctcctgcttcagcctcctgagtagctgggactatgggtgcgtgccaccacgcccggctaattttttttttttttttttttttttttttgtatttttartagagacagggtttcaccatgttgaccaggctggtctcgaactcctgacctcagacgatccgcccatcttggcctcccaaagtgctgggattacaggcataagccaccacaccaagcatttttttttttttaatagataagggcttcctacattgcccaggctgatctcgaacacctagcctcacctttttatgtgccaggacaacaagcctgagccaccacgcctcccctcaattttcttataattagtgttactattattgtcattatgtccatccaagtgcacaggtgggagtcattgccactggaatgtacattcaaatcctttggcaatggacatggaaacacaaccccaagggcaaaacaagttgaaactcttcaaagtcaagatagcggttaccctggagggggaagaggttagtgacaaggtggatatatgaggctagcgttcagggggctgctctggtcctgtttctctttttgaggcagggtcttgctctgttgcccaggctgaagtgcagtagtgcgatcttggctcactgtagccttgacctcccaggctcaagtgatcctcccgcctcagcctcctgaacagctgggactaccatacccatctgatttttgtattatttgtagagatggggtctcgccatgctgcccaagtagtcttgaactcctgggctcaagcgatcctcccctctgggcctctcaaactgctgggattacaggcatgagccattgcacctggccccaggtcctgtttcttgatcaggatgtagtttgcgtgggtagctcccctttgtgaaacctcagcaggctggatgtcatcaagctgcacatctctgtaggagtgattttaattggaaggtgcagacagaacactcaaactgattgttcttgctgtgttaggatcttggttaagagggccagctttagatgcccattgctggccttcgactccagattaccactcgctagctgtgtggcttaacacaagctgcttaacctctctgtgcctcaattttattagctgggaaataagtctgcagggctgtgagtacccaagccctttgtacttcatttggtaaaaaagttggaacctttaagcactgtttagatcttgctttattttgctattaattaacaaatgacattatgttatttttttttattttttwtttttttgagatggagtctcgctctgttgcccaggctggagtgcagtggcgtgatctcagctcactgcaacctctgcctcctgggttcgagcgattctcctgcctcagcctcccaagtagctggtagctgggactacaggtgcctcccaccacacccagctaatttttgtatttttagtagagacagggtttcaccgtataggccaggctggtctcaaactcctgaccttgtgatccgcctgcctcagcctcccaaagtgctgggattataggagtgagccaccatgcccagcctttctttctttctttttatttatttatttatttatctttgacattgagtctcgctctgttgcccaggctggacttcagtggcacgatttcggctcactgcaagctccgcctcccaggttcaagcaattgaacctcccgagtagctgggaccacaggtgcccactaccccggctaatttttttttgtatttttagtagagatggagtttccccatgttggccaggctggtcttgaactcctgacctcaaatgatccacctgcctctacctcccaaattgctaggattacaggcatgaggcactgcgcatggccgattttttttttttttccagcgaatgcatttctggttggagtattctacttgcttccagtgttgtgagtatgaaaccagataacacacatcaagtgcccagcacagtgtttagcatgctggtgctcaatcgatgctggctgttagtactagtttccttttcctaagatatcaaaaggcactgggcgagaatttcttggaaacatgttttctcctctaagcccatcctgtggcagtcaacatatgatgggcgtttctgaggtcaactttttgcttattggaatgcaatgtcactgtgtcccaggcttggcttttccgtgtgttgtaattgtagcaacactggaagcacatactataccacgaaaatgaaatgcgttctgtaaaaggaaaaaatcttaatgtcatttgcgaattaacagcaaaataaaataaaacactgcctctttcaggcccctccccgaggtttcaaactgcccaggaaataaagttctcagggctggtgcggtggttcatgcctgtaatcccagcactttgggaggccgaggcaggcagttcacccgagcttaggagtttgagaccagcccggccaacagagtaaaacctcgtctctactaaaaatacaaaaattagtcggacatggtggcacatgcctgtagtcccagctatttgggaagctgaggcaggagaatcgttcgaacctgagacgtggaggttacagtgagccaagatcgtaccactggactccagcctgggcgacagagtgactccatctcaaaaaaagaaaaaaaaaaagttatcaggcctgcaaacctagtaggacccctcaacccatttcccaatttcatttcactcctgtcctccaaatccctctctaatgttccagcccarccgaactcaacgcctgcaagaagggwtctgcattttcccaactccaggcctttgcttacagacctcttagcgggtgaacaggacagctctgccctctctccccagcatattgcagtcaaattctactcatcctttaagagctgtttcatgcaccacctcctccctgaagcttctcctgacttattcccagctgggaaggacctcctctcacccctgccccaggaggaatccatggatgtgggttttttgttgttgttgygtttttttgtttatttgttttttgagacggggtctcgctctgtcgtccaggctatagggcagtggcgcgatctcggctcactgcagcctctgcctcttgggttcaggcaattctgtctcctcagcctcctgagtagctgggattacaagggtgtgccaccacacccagctaatttttgcatttttagtagagatggggtttcaccatnnnnnnnnnnnnnnnnnnnnnnnnnnnnnnnnnnnnnnnnnnnnnnnnnnnnnnnnnnnnnnnnnnnnnnnnnnnnnnnnnnnnnnnnnnnnnnnnnnnnnnnnnnnnnnnnnnnnnnnnnnnnnnnnnnnnnnnnnnnnnnnnnnnnnnnnnnnnnnnnnnnnnnnnnnnnnnnnnnnnnnnnnnnnnnnnnnnnnnnnnnnnnnnnnnnnnnnnnnnaacatggcaaaaccctgtctctactaaaaatattttaaaaattagctgggcatggtggcacatgcctgtaataccagctactcggggaggctgaggcaggagaatcttttgaaccagagaggctgagcttgcagtgagccaagattccaccattgcactccagcctgggtgacagagtgagactccatctcaaaaaaaaaaaaaaaaagagagagactttgtagatgtgattagatgaaggatcttgagatgggggaggtgatctgacattagggatgggcccagtgtaatctcaagagagaagcaggagcgtcagcctcagaggagatgtgataccgggacaggagacaggggtcacagtgacgcagccatgaccagggaaggcagcagcttctcaaagctagaaaaatcaaggaacagacctcccctggagcctccaaaaggaactagccctgtggacaccttgattttagctctgtaatccccatttcagactttcttccaaactctgagataatgactgtatgttgtgtgaagccactaagtgaggggtaagtcgttacagcagccgtagaaaactaacacgggtctagaaccatctggtatattttgaggttggtctcaatggactggtcaagagatttatgccatgagttagactctctgcagaatttggatgaattagacattgaacacaggtctgaccctctattgctatgcaggattgggcatcaggtcacctcctggttgtgttcaatatcaaacgttactccagggagactgaagtgaycaactgggcttctggaggcagcgctcccaggactgaacggggccctggggaaaaccaccccacatatgcagccttctagattagtcctccagctctgctccttccctggagggacacaaacagggtggaagggatgactgattctggtcagcactctcagatgggtgaccctgggcaaggtgaaagaatgtttctgagcctgagttccttcctatggaaaatggagctaagaacagacatattttgcattgacatattttgcattatcacattttgcattgctataaaggaatacccaagaccgggtaatttataaagaaaagaggtttatttggctcacggttctgcaggctgtacaggaagcaagccaccagcatctgtttggtttctggcgagggcctcaaaaagctttggctcatggcagaaggcaaagggggagcaggcatgtcacatggtgaaagagagagagagagaggagggagggatcttttaaacaaccagatgttgcatgaactaatagagtgagaactcactcatcaccagaacaacactaagccattcatgagggacccacccccatcacccagacacctcctcctaggcccacctgcaacatcacaggcttcaacatgagatttgcaaggaasaaaacattcaaaccgtaacacatacttatccagccatactgttgtgagtcaggagtgagaaaatgtgtgtctaaaattatattccaggccgggcatggtggctcacgcttgtaatttcagcactttgggaggctgaggcgggtggatcacctgaggtcaggagttcaagactagcctggccaacgtggtgaaaccccatctctactaaaaatacaaaaatttgctggtcgtggtggcgcatgcctataatcctagccactcaggaggctgagtcaggagaatcacttgaacccaggaggcggaggttgcagtgagccgagatcgcaccattatattccagcctgggcaacaagagcaaaactcaaaaaaataataataataaataaaattatatttaaaatgcgaattgtatcggccctgtgtactaaaggagcttgtcctagtgaaataaccaccttcttctcccagtaaaacccrtacaaggactgacattgattttaaagccctgtgaaggcgtcagcctgagattatgctggttcttctcttgcaggtgaagtctattacaggagcaaatacctgagaagcgatacctacaacaccaatattgaggcaaacaggattgtggtgtctgagtttggaacaatggcctatccggacccctgcaaaaacatattttccaagtaactgcctattttaaatctgagcaaatttcatgctttttgctatccttgatggctgaaataaccagcatttgctcctctgacaattctctttagggtagatgaaaactccacatgactgccctttaaccagaggtgctacacagttcttgatcactgattgccagagagactaagagcatttgacaaattattagaagccctcccacatggctggtgggaaagcgatttggaatcatctgtcaaaattataaatgcgtattcccttcagcctagagatctgcttacttgcatagaaaatgacacatgcaccaggtatttgtcatttatggctgcatcatttgttataacaagtagctgaaaacaacccaaatgttcattaaaagaggastggttaaatccgtaacagtaaaactgtacgagaaaatgccatgtagaagtaaaaaggaatgaggatgttctctttgcactctacagaagcttttccaagatagactaagtggaaaaaaaaaaaaaaaggaaggtgtagaaagagcatgttataagctgtactttgtgtgaaaaagcagtaagaaatctaaattaaattttgcttgtacatgcataaagaaactaggaaaggatgcacaggggcagatggatgttgaggagagggagagattttttgctgtatatattttatttcatttcatttcattttattcatttatttatttatttaagatggagtttcactcttcttgtccaagctggagtgcaatggcgcaatctcagttcaccgcaacctctgccccccaggttcaagtgattctcctgcctcagcctcccaagtagctgggattacaggcacccaccaccacgcccggctaatttttatattttcagtagagacggggtttcaccatgttgatcaggctggtcttgaactcctgatcttaggtgatccacccaccttggcatcccaaagtgctaggattacaggcatgagccactgcgcctggccactgtatacattttaaatcatctggattagtatccatatgaatgtgttacatatctgacagttaaattcttggccagggaatcaggcctgccatcagtatcttctttctgaaactctctagatgtagaagagttatgaaagagttgaagggtggactggcccagagatggaagattgcttctgcttttttgagaactgaagtcatctctcccattccagtatccagctctagggctagctcagagcaagcactgaattcacatttgcaaataggaggtgtggagtaggagccagtgagaaaggaggaggaaagagcaaaggaatttaaaaccaccatacttacctggtaggggagatagcaggatcacgaatttgaaaccacgacctggaggtcctggaaccaagcctcctttttgttccagtgtttgccagtaggaggagcactccccaatacaccgatacaggatttgccaatttcaycacccataaacccctctggtttttctttcttcttgctttgagtataccttctgatcaaatgagctatgtgttcttaactcataattagtttgttttcctttttaaattaaaaactaatttcctggataaattcgagataaccagtgtggactcacattcctggcaaagcagatatcagctacgttgttaggctttgggagccgttacgggttcatatacgatttccgtagagcttcttgacatactttggaacagtatgtcttgctggctctgatgttagagacctttgggttttggggagcccaggaggatcagctggtgaccatggcattccggccgactcatttcttagctaactcaacgtggaggtgtctttggggtgtctgagttcttaggattcctcaggtgacccattgggacccagttgctttttcttccttagttgaagtaaagcattttttttttttctttgagacagagtctcgctctttcgcccaggctggagtgtagtggcgccatctcggttcactgcaagctccgcctcccgggttcacgccattctcctgcctcagcctcccgagtagctgggactacaggcgcctgccaccacgcccggctgattttttgtattttttagtacagacggggtttcaccgtgttggccaggatggtctcaatctcctgacctcgtgatccacctgcctcggcctcccacagtgctgggattacaggcacccggccgaagtaaagcatttttaagtggtaggaaaactaaagccatcaaggatagacttctctggctgggtggacatagccactgactctgttgatttgcttttctccccagagctttctcctacttgtctcacaccatccccgatttcacmgacaactgcctgatcaacatcatgaagtgcggagaagacttctacgcgacctcagagaccaattacatcaggaaaatcaacccacagactctggaaaccctggagaaggtatcaacacataygtaaccagyatcacttcctgactcaagaaagggagagtcggcgacggccggggtgaggttgctcagcctgcaagcagcttaccaggggagcccctcctctaacaccgttggatcccgtgccctagcgccacacttactgctagatgctaggcagggactgtgttgtttttatcttcgtgtctgtatcagtttcctggggctgatgtaaccaagtcctacaaaaaagattgctttaaacaacagaaattggctgggtgtggtgacctacacctgtaattccagcactttgggaggtcaaggtgggcagatcacctgaggtcaggagtttgagaccagcctggccaacatggtgaaaccccatctctaccaaaaatacaaaaattagccaggcgtggtggcatgtgcctgtaatcccagctactctgaggctgaggcaggagaatcgcttgaactcaggagggggaggttgcagtgagcccagattgcaccactgcactccagcctgcatgacagagtgagactctgtctcaaacaaaaacaaaaaacaaaaaaaaaaaaaaacaagacaaacaaataaaaaaacagaaatttactctctcacagttctggaggttaaaagtctgaaaccaaggtgtcagcccggccatgctctctctgaagactctagaggagggtcctccctggccccttcctggcttctagcggttgccggcaacccctggtgttcctcagcttgtagatgcatccctccagcctctgcctcagtcttcacactgcctctccttatggggctatgtgtccaaatgttctgccttttttttttttttttttttgaaaaagtgtcttgctctgtcgcccagactggagtgcagtggtgcgatctcagctcactgcaacctccgcctcctgggttcaagcgattcttctgcctcagcctcctgagtagctgggactacaggcacgtgccaccacacttcactaattttttgtatttttggtacagatggggtttcaccgtgttagccaggctggtcttgatctcctgacctcatgattggccctcatgattacaggcgtgagccattgcacccaaccatgttctgccttttatagagacacaagtcattgcattagggcccaccccagtgcagtatgacctcatcttaacttaatgacatctataaagaccttatttccaagtaaggtcacattcacaggtacccaaggtgaggacttcaacctatcttttttgcaagacacaattcaacccataactctgttcataattcttggcactgagggagttcactgagaatttgaatgaatgactgttgaaatgcctgcgattctcagcaatcctaccttctattgacctgaagagggaggcattaggcaaaaagctagggcacaaaaatcagtgcccaagcacatacctttcctgggaagaatcaagtcaacattttggtgggaatcaatagacccactttcaattttctccagctggctgttcaaaattccgatgtctctgcaatacgttttaacgatctgttaaagagatgaggcttttcttagctgtgaaattatgtccagctccttttaagctagacggcatcggtccaactgatgatgctttccacagggctacagagaggaaatgctggaagagaaaggagttatctgactctgggctggaggttgtgtttttctaggggaggaagcgcagacggttggtctgcggccactccatcattctgcagctgtggactgcagagtgagggtcattattcagctcgttgatcaarcttcactttgaccaaatgtttttgtaacctctccattcccagaataatcgtctaagagaggcctagagatttatgcttctgtgcaatgcaaaagggcagaatttaagccagaatgacagaactgtggccaagattagctcgaaggctacctctctgcccaggtcattgctcagagctttctgcagtgaggaatcttgtttccatgttgaggattccagcaaggtcaggcaacaggattggaacgatagccacagaagcacaccagctccctaactcccctgcaacctattagctgtctgagtccctcaaatccccatgtgaggttgtataaggtcacaagagtgaaagtcttctttaaaagcaaattctgtatcgttttcagatcaacagagtgcaaaaatatccctcatctctctgaacctagaatcagtcacgttttcataggacttcaacctttctcctttgaaaaaccagatgatgtcatatcttgcaggttgattatcgtaaatactttaaaaaacaggaggtgtcatatcttgcaggttgattatcgtaaatacgtggcggtaaatctggcaacgtcacatccccattatgatgaggctggaaatgttctaaacatgggcacatccattgtggaaaaggggaagacaaagtatgtgatttttaagatccctgccacagtaccaggtaggccactctggggaattgaataaaacacaaacaaccaagtgtggcttcttctgaagagttctgtttttcgttgatgacacaagatccagtgtggtactttctcccgtagattattgaggtggaccatgaagtcagtactttcctttagaagagaagaggagatgctgggattcctcttggaagaaagaaatccctttactattctaatttccttttatttaggctccagtttattattttattaatttatctacccatctaccatccatccatccatcatctatttaccatccaaccattccttcatctaccatccatccattcatgcatctactcaccgtccatctatccaccattcattcagctactcactatccatccacccacctacccaccattcatccacctatccatcacccatccaccatnnnnnnnnnnnnnnnnnnnnnnnnnnnnnnnnnnnnnnnnnnnnnnnnnnnnnnnnnnnnnnnnnnnnnnnnnnnnnnnnnnnnnnnnnnnnnnnnnnnnnnnnnnnnnnnnnnnnnnnnnnnnnnnnnnnnnnnnnnnnnnnnnnnnnnnnnnnnnnnnnnnnnnnnnnnnnnnnnnnnnnnnnnnnnnnnnnnnnnnnnnnnnnnnnnnnnnnnnnnnnnnnnnnnnnnnnnnnnnnnnnnnnnnnnnnnnnnnnnnnnnnnnnnnnnnnnnnnnnnnnnnnnnnnnnnnnnnnnnnnnnnnnnnnatgaatccatttatccatctacccattctcccatccatcaacccattcacttacccaccatccatccatccattgagcttcccacccacccatccatccatcattcatccatccatccacccacccatccaccatccatccattcatccatccacccacacaccatctacccatccatccgtccacccaccatccatccaccatccatctacctacccatccacccacccaccatgaatccattcatccatctacatgttctgccatccatccactcatccacttatccaccatccatccattgagccacccacctgcccatccatccatcattcatccatctacccaccatctatacacccaccattcatccatctatccatctaccatccatccatccacccacccaacatccatctaccatgtgcatctaccacccatctattcactcaacatccttccatccaccatctatccatccacccaccatccatctgtctactatccaccgattcatgcatgcacccacccacccacctatcgattcatccttccatccattcagtttttcagtctcctgacaaaactttctatgacaaggttatgccacctactttcattcctagcccctgcagccaagtttccagggctgtttagggagctcagtcctgctgggatccactccagatccctgccctgttctccaggccttctggaccttctccatgtggggctgggatcttggagcaaagcccaggctgactgtgattgcatgatcctgagggggaggaggcggaggctcttagcccatgtttgtccaggaccctcctgggaaccacacccaggagacctaggcctgtgaggacagctgacaggactcaggagacagtgcagaactacaacggtgcttcctctgaccttctagtttaaaaaaaactagtttctgcctgtgatccttgctgctcccccatcccccactgtcttgtagagccccctgagcaaactaccaggcactgcctggagatatgagccttcgaggtcagaaggtacacggagtgtacttgctaaatagaactctcattaattaagccagtaaagggatataggggtcaagctcagaatcctagaatgccatacctggggattgtctaggcatttgagtttgccaccttgtattacagaggaggactgtgaggctcaggggatcagatgacacaccccagtcacacagctcccaggagccactgacatcctgcaagcagagatcctctgagcacctgctccatgctggcggtggcactgcgactcatgccccatcctgctcctcccaggccacagtgcttttcgtttcagtttgcattgtgttccatttgttttataaagacgataactatcccacaaccccacagcatccctcccaccagccagctgtttacagggtgcacaggtggccacaagagaggtgggggaagtttgcagataactcattataagccagccgtaggcctgggtggggaggccttttgaccagcgagtgactcatgcttgcagaggaataagaaaactgaacacgtattgagcaccttccatgtttgggtgcagggcgaggcacatggatgactgctttatttcattctgttctctaccttcactgtatgagagtcgtaatccctgataaaagaggaggaaggcgaagggggctgtgttttcttggcttaaccctatgactctgaccataatgatagcccattccactaagcctcagtttcccatctataaaatggccattctacagccccgcttgactatctgcatttatataaaacccctaattatggccgggcgcagtggctcacacctgtaatcccagcactttgggaggccgaggcgggcagatcacctgaggtcaggagttcgagaacagcctggccaacatggcaaaaccccatctctactaaaaatgcaaaaattagccaagcatggtggcgtgagcctattgtaccagctactcgggaggctgaggcaggagaattgcttgaacctgggaggcggagattgaagtgggctgagatcgtgcccctacattccagtctgggcagcagagggagactctatctcagacaaaccggtggaggcaggatttagcccccaggctataggtgaagaccccttacctggagggctccctcttggttcagtggttttcagattgtatatggggtgggtgctgagtggaaggtctcagcctggccccctgcagcagctgcagcaaccttkttgtctgtctacacgttgctgtttaatgtaaaggttttyttcagcaatcaagtcagtttgtaggtgatggtggtgtggtcttgsgggggcagccagatcctgcacaattcctgaggcttgctttttgtcttgctagagggcaagaagcaggggaagagcccctggaagcacacagaggtgttctgctccatcccrtcccgctccctgctctccccaagctactmccacagctttggagtcaccgagaactatgtcatcttccttgagcagcctttcaggttggatattctcaagatggcaaccgcatacatccggagwatgagctgggcctcctgcctggctttccacagggaggagaaggtgaggtctggctggactctagcccagtgggtgctggctgaccatggagggaggctggtgtgcaggagggtgaagtttaaggcaaggaagtggcatggaagagggaggaggctaccagaggcatctacccaccttccagcaagttctgaagctggatggtccttcagaatggcccccaggcctttgtacccccacggtgatgagttattggatgaggctgtccaggcaagggggtgccatcttgggcaaacatggaagccctggcagtccccrtatgcccagcagcaaaaggagtgagtcctcagtccttatggagagctgggctcctccccacctccgccctgttgacaagaccccttaaccatgtctgctaccagtgtgtagcgttggggcggtagcggccagaggtttagacattgtaatgacagtatgttccaccagacagttcaatagaaacctctccttccattcaggtacacctgagtgctcaaagtatgtatgcacgtattgcatgcttgtatatgcacatatgcatgtatatgtgtacatgtatatgtgcatgtatgtgcatatgtgtatgaatacatgtacgtgtgcatgggtgtatgtatgtattactagtgtttatttacttgttgggtttttattgtgggggggttgtttttgagacagagtgttgctctgtcacccaggctggagtgcactggtacaatcacagctcagtgcaccctcaacctcccaggctcaagtgatcctcccaagtagctggaaccagaggcacatgtctctatgcctggctaattttttgttgttttgtagagattggggtcttgctatgttgcccaggctagcctcaaactctggactcaagtgatcctcctcccttcccctcccaaagtactgggattacatgtgtgagccattgcacctggtctttttttttttttttttttgcgttgtcacttcacttttgtaaaatatccagtagttctcagtgttacctattcaaagaatatacaagtatagaaagccatgtataaaatcctccccaactcacttcccccctcctgcctcccatccacccccacgtctgaagggagccactgctacccactgacactgtgttactccaccatctctgccttcacgtgcacttttagtttttcttttttttttttttcagatagagtctcactctgtcacccaggctggagcrcagtggtgcgatatcagttcactgtaacctccgcctacgtatcaagctattctcctctctcagcctcctgagtagttgggatyataggcacacgccacaatgcctagtgaatttatttatttatttattttttgagatggagttccatgcttgtcgcctaggctggaatgcaatggcacattcttggctcactgcaccctccacctcctgggttcaagcgattctcctgcctccacctcctgagtagttgggattacaggcaagtgccaccatgcctggctaattttttgtatttttagtagagatggggttttgccatgttggccaggctagtcttgaactcctgacctcaagtgatccacctgcccggcctcccaaagtgctgggattacagcatgagccactgtgccctgccaaggctccagtcttagatggagcctggcacctggcagattctccccaacttggtcattgccagggagctgggatgtcaggacaatggaacaaggggaccgtgcacactggagcgtctctccaaacactgtcctcctagtgactgcaaagactctggcagcaaagcatccctcctctccatctgaaagatatacttatggaagtacaataaacagctctcattttggggggcacttttgcctgtctggtgttgtggagcacacacagaatgcagaatggggacatagtcctgagcctagctcctggcggggctgggttttgttcagcccccagatgccacagtgccaggctgagagagggtgagctgagcccttgatatgtgtcctttntcagacttatatccacatcatcgaccaaaggaccaggcagcctgtgcagaccaagttttacacagacgccatggtggtcttccatcacgtcaacgcctacgaagaggacggctgcatcgtgtttgacgtcattgcctacgaggacaacagcctctaccagctcttctacctggccaacctgaaccaggacttcaaggagaactccaggctcacctcggtccccaccctcaggaggtttgccgtgcccctccacgtggacaaggtaatggcttccaaggaggtcccttttctttctagagagatatcggcycaggtgggaagttactttggcccttatttgattgacattgaaatccaaatgaactgttcttgaaaaaaaaaaaagttttcattgtttttcccaaagtagtaccgattcataataaaaactttagaaaatatagataagtaaaaaggagaaaaaaatccctataaacctaccaccgaagatgatcactgtggatatatatgtttgtctcccagtctctctctctgtgtctgtgtgtgtgtgtgtgtgtgtgtgtgtgtgtgtgtgtgaatcttcattttaatcatattgtacataatttttttttttttgagacgtagtctcgctctgtcacccaggctggagtgcagtgttgcgatctctgctcgctgcaagctccacctcccaggctcacgccattctcctgcctcagcctctggagtagctgggactacaggtgcccgccaccatgcccagagaattttttgtatttttagtagagacggggtttcaccgtgttagccaggatggtctggatctcccgacctcgtgatccacccgcctcggcctcccaaagtgctgggattacaggcgtgagccactgcacctggctgtcttacataatttttaacagctttattgagatgtaattgacacagcatacaatttgcccttttatttatttttttttttattttttttgagacagagtcttgctctgtcacccaggctggagtgcagtgccatgatctaagctcactgcaacctctgcctcctggattcaagcggttctcctgcctcggcctctcaagtacctgggattacaggcgcctgccaccacgcccagctaatttttgtatttttagaaaagacggggtttcaccatgttgctcaggctgttctcgaactcctgacctcaggtgatccacccaccttggcctcccaaagagctgagattacaggcgtgagccaccatgcctggcctaatttgcccatttaaagtgtttgacagcctttggtatgttttcacagttgtgcatccaccaccacgataaattttagaacattttcatcacctccaaaacacaccccacaccccttagccatcacctcctagtcttcccctccctgccccaggcaacctgtcatctgctctctgtctctgcagacttgccctttctagacatcacgtataaatggagtcttacaatacgtgatcttttgtgtccggctcctttcacacagcacagtgttgtcaaggctcatctgtgttgtagtccgtataagtgcttcatttctttttgttgttgttgttggtttttgcttgtttgtttgttttgagacagtctcgctctgccgcccaggctggagtgcagtggtgtaatctcggctcattgcaacctctgcctctgaggttcaagcaattcttgtgcctcagcctcctgagtagctgggattacaggtgcccaccaccatgcctaagtttttgtatttttagtagaggtgaagtttcgccatgttgcccaggccggtcttgaactcctgaactcaggcaatctgcccccctacgtctcccaaagtgctggggtttcaggtgtgagccacagtgcccggccagtacttcatttctttttatggattaataggtacatactatcttacagactgcttttcttttctttcttttttttttttttttttgagaaggagtctcgctctgtggcccaggctggagtgcagtggcgcagtctcagctcactgcaagctccgcctcccaggttcaagccattctccttcctcagcctcccaagtagctgggactacagacacctgccaccacgcctggctaattttttttttgtattttttagtagagacagggtttcaccgtgttagccaggatggtctcaacctcctgacctcatgatccgcccgccttggcctcccaaagtgctgggattacaggcgtgagccaccgcgcccggcccagactgcttttctacctatttatgtatcgaaacatctctccatgacattaaatattctttgaaacatcactttaaacatttgcctaatcgttcatggcagggattcatcaccatttgcttacacaattctctgatgttgaaagttccgttcttgcactaagaatgaccaccaggccagacattatccccaattagggtgatgtggcccaggctctgggctttacttacagagacttacaamggcttctggctccagaactcactgacttcatgacttaattaatttaagtgaaaccaaattcaattcaattaaatgttgatggyttacattgactaaatgcaagttatgtgccaggtactttgctaagcattttgtttttcttacctcacttaatgatcaaaacaacctgtgggaaacgtccctgtagaagcctcattttacagatgaacaaactgaggctcagagaagttaagaaatgtgggcaaggtcacagcccagagtggcagagccaagactggaacctgccccartctgtctctaaacccccattttttttttctttttgtgggggatggagtcttgttgtgtcacccaggctggagtgcagtggtttaatctcggctcactgcaatctccgcctcctgggttctagcgattctcctgtctcagtttcccaagaagctgggattacaggcacgtgccagcacacacagctcattttttgtttgtttgtttgtatttttagtagagatggggtttcaccatgttggccaggctggtcttgaactcctgacctcaagttatccacccacctcagccttccaaagtgctgagattataggcatgagccaccgtggccggccctaaacccctgtttgtaactacgaaggaggaggaactctgctattctccccagtagccctaagtcctaggaaagagcctcagatgggccacacttggcactctgcaggcctggcagacggtcctacagtgtccagggagccttttcccacccttaccgcccagtttctcagtgcaggaattcagccaccctcccagccagcgggcaggggagctggcgtttgaactgaggtttgtctgactccagagctggggtcctctcccatctctccagcattttcccacccatggccatttgtgtatctctgccatggtttttgtcatattttatatcacctctacttaacatttaaaaatccttttttttttttcatttcaatcaattcactctctacttagctcatttgaaaggaaacacatcactacccagtagaaagctggcaatgcttgctgcacagagaagacaagcatgagaataaaatagtggaaataaagcagaggtcttgagctccagccagagggctgtggcttaccaagacctgatctctctgtgaaaaagccaagttttaaaagtattaggcattaaagacatcgtggcaccgcactgagactctccttgacctagtcagaacaactggaagagaaaaaggcattgattttctcccctatgtgactcagggctattggatgaacagccaygtcccatgaaatcagcacatgagccctgggcgcctgcaccccttgctccagaagcaccgcagtgcagcccctcagactttctcctggttccaggaagtactgaggagtaacaaggcacaaaggtagtaagtctcaaggctgacctcagcctagggatagtacacagagaggaacatactccctcccactgccacaccttacaagattttataaccttttgtcatgctcgagaatgctttgctgccttggaaccaagctaagaatgttagcttgtgtatcttttttttttttttttttttttgagacagagtctcgctctgtcgcccaggctggagtgcagtggcgtgatctcggctcactgcaagctccgcctcccgggttcacgccattctgctgcctcagcctccctagtggctgggactacaggcgcccgccactacacctggcttattgttttgtatttttggtagagacggggtttcaccgtattagccaggatggtctcgatcttctgnnnnnnnnnnnnnnnnnnnnnnnnnnnnnnnnnnnnnnnnnnnnnnnnnnnnnnnnnnnnnnnnnnnnnnnnnnnnnnnnnnnnnnnnnnnnnnnnnnnnnnnnnnnnnnnnnnnnnnnnnnnnnnnnnnnnnnnnnnnnnnnnnnnnnnnnnnnngtgttcaggcacagtggctcacgcctgtaatcccaacactttaggaggcccaggcaggtgatcacctgaggtcaggagttcaacaccagcctggccaacaaggtgaaaccctgtctctgctaaaaatgtaaaaattagcttggcgtggtggcccctgcctgtaatcttagctactcaggaggctgaggcaggagaattgcttgaacccaggaggtggaggctgcagtgagctgagatcccaccactgcactccagcctgatcccgccactgcactccagcatgggcaacagagtgagactccatctcaaaaaaaaaaaraaagaaagctgtcatatgaaccatctgctgctttgaaactagcaaaggaaagcaagccctgggatgggtagctccagccacgctttttaattgctacttaytgtcccttaaatatgtcttcttactgcactttcaatggctccgcctgcatagtgaaatcagaaagtcaggcaggtggacagagccttacatgccctgatccagcagctttggctccaccccatccagaggtttactggagaagcgacttcaggaagatgctgcccttactcagatgccctctgggcctgaggcctttgcaggacattgctttcccctctgtctgaaaccctgtcctcctgggctgayactcctgctccccctggctggctgcacattgggatcccctggagagccctgagacccccatgtccgggccttggcttccgcccagaccggggaagcccaggcccgggtgtggtctcagaaacccccagtgattctgcagtgcagccgtggcagagaacctccaaggtcagggatcagcagcatgaccccgcagctgagtccrtatcctctaatggcgccttgtaactctttgtcaacatttatctcwagtgtaagtaacttgttcatttccctctkcctgttcaagcctaagttctgggaggacagggactctgtctcatcagcagttcatctgctgcactcagagggtgctcttaaatatttgaaatgaatgaatgaatgatgaatacatgaaaaatgggaagcaagttctctaaaagggcgcagcatcttccttcagcctttggaacccgtcccaagtgaaaagtgcttcccacatagaacaggcaatagcaaattctatttaaaaggccaggaggtcctgaatgtcccagattctcttgctttgggaccagctggggtcaaaggaaggcagggctggcagggcctctgggcaccgtgggcctgtttacgcagggcggtgtgggggtgcctgaggcagggcttagcagtggcggggtgtggctgggaggggtgtgggcaggggtgggtcatctggaccttggccctgccctggtgctgcagggcgctgtgtgaggcccgaggttcgtgtgcacccacgcctaaggggcattcacaggaggaagcactgtggacctggaaggkatggctttgatgactggatcagtgggtttggtttctgtctccaaatgcacaaatgcagacactccartaagagaagcaccattcatggaggacccgctaggtgccaggctctgtgttcaatgccttttctgctcttagaccctggcaagaggggcccctgctctgggtttggcactttggaggactgtggtccaggctttctttctctagcaggacccgtactccacagggtgagttcacagggccaaggcattctgactacccagaggggtgcttccacccccaccccaaccatgtgctggacacctgggatcccagaagctcctgaagggcccarccttgcttccaatacccgtcttcctaagggcagactgccactctgctgttcctgccacaggcccatgaggtggccagggctggctgttgccttggttgtgctggctagggcatccacgcagtgagggatggagcctgggatgaggcaggaaggagccaagggccagagactgccttattccagctcagaactctaaggagtcctggggttctcaattcacagtcatcctttcagaccagcacagtgcattgctggaacattctgtctgtccaacacagtagctactaactacgagttgttattgtacacttgaaatgtggctggtgcagctaaggaattgaatttttaattttacttaagcttattttaaaattaaatttaaggccaggcatggtggctcacgcgtgtaaacccagcactttgggaggccaagccaggcagatcacttgaggtcaggagttcaagaccagcttggccaacatgatgaaaccccatctctactaaaaatacaaaacttagccaggcatggtggctcatgcctgtaacctcagctactcaggaagctgaggcaggggaactgctcgaacccgggaggcggaggttgcagtgagctgagatcgtgccaccgtattccgcctggatgacagagtgagactcagtctcaaaaaaaaaaaaaaaaaaaagtaaaataaaataaaattaaatttaaatcgcaacatatggctagcgattgccgtttgggacagcctgttccacgccatcatgaagggctgcgtgtcaaggcagggagagagatggtgttggacttaatttgcttggtgtatttagacagaaggttggtgggcctccacttgtactctcctcctggctcctgtgaattttaggggctgtgaagtgctttgctaatcttcatcacaatgttctaagttatttatgatccyccacgtctacagatgagaaagtaacttgcccaactttttagaatcatccccaggacttgagctggaactggaatgtacgcctgtctgcctgcacgatgtgtgtggccctggaccagcctatttttctcaaccattatttaatttaatcctaacataatgctcagatgcaggtggaaaccgcctcacttatacccagcaccacactaaaagttatgaatcaccaccccgattttacacagtggaggaaactagctctgagaaaaagaggtctgctcgaatctgcatggaaaaccacagcgttgaatttcatatggcaggcagcattctaggggatgacagtgatgactgcttcttatgagagttcccttaagtgtcgggatttcaatgtaagcttgcaagatggtgctggattctggctggaaagtgatgtcttcctaaaactgagcatgctggccactgaaagcagccaagtcatgtttgttattgctgtgtgtggaaaaattcacagtttattcctcaaccagtccgaccagtttggggctggagttataagatgtctgtgcagaccaactccctaagaatcaaggctggaatgtgcccagaggtctcttgctgtcacatgcttagcaaggtaccaggaagggcctcccaccagcttgcagagccatggaggtggaggcattgaaagtttctgtttattttattttatttttttttgagacagagtctcgctctgtcgcccaggctggagtgcagtgacgcgatctcggctcattgcaacctccgcctcccaggttcaagcgattctcctgcctcagtctcctgagcagctgggactacaggcatgtgctaccacgcagggctaatttttacattttgagtagagatggggtttcaccatgttagccaggctggtctcgaactcctgacctcagatgatccacccacctcggcctcccaaagtgctgggattacaggcatgagcccccgcactcagctaaatgtttctaagaagccaccgatgtgccaggtgctgggctcctttgtctctgcatttcctctcatttgattcttacagccaccgtgcaaaacaagtcttgccccttgacagcccaaagaaaagcttattgagttgtgcattcactcattaattcagcgattacttcctgggcactaggtgccaggcactgagcaaaatctggtccctggcttcatgcggcagacaagctaaaataaggaaaagagcttcataaaggagataattacagctcagggccagtgccttggagacactgcagattccaatggagttgttagggaaggggtgtttcttctgagacctcagggtttggggaagaaccagcctcagggcctttgcactgccttcaccctctaccagcaatgctcttgcttctgggccaaagaatcaatgcaaaggccccaggcacagggtctgcttctctccatgtgactttggaccagtccctttccttctctaggcctcagttacttctacaaatcgagactgaattaaacaaatttccgaggacccttgcggttcagctgctaagttgcagtaaacttttcatgctctccaacaaaaatgctgctatccctaaaataggttggttttaattataaaagccattttgagccaggtgtactggctcatgcttgtaatcccagcactttgggaggtcaagagaggaggatcacttgagcccaggagttcgagaccaagctgggcaacatagtgagaccctgtctctacaaaaaatacaaaaattaaccaaggatggtgacgcatgcccgtagtcccccagctactcaggaggctgaggtggaaggatcacttgagcctgggagtttaaggctacagtgagctgtcatcacactactgtactccagcctgggcgacagagcaagaccctgtcccaaaataaaatagaagctatcttagaaaatgtagaaagtagagaaaagtttaaatgagaagtcagccataacaataatgttccrtcctcttgttcctcaatatcttccagagcctaacccgtastcacctccagtagtggtggcagcaatataataataataagtgatagtagtagtagtatggtaataatagtaataataatataacaacgtcatcaatagaagcagctgacattcatctagcacttattgtgaagcaggcattcttgtgaatcatttgtgcagatgatgtcattcagtctgcacaataactcaaagatgcatatgctattaatatacacataaggaaacggaactatagagaggccaactgacttgctcaaggccccacggttagtacatgagggaaacagggagtagtagatgctcaataaatatttaatcatgctaaatccctccccttgcttatactgatgacagtaagatactgaacacagcaaaatctgactgtaaattgagaccaagaaatgtccttgaaggctgttttgccaccaaataatttttattgcatgtttgttttcatttctgcagtgataacttttcctagaagaaaatactgaaaatacagagaggcatacaaaaaagaaattaaagtccccccaatcccatcatctgttgtatttttwatatttagtatatttctggctgggcgtggtggctcacgccygtaatcccagcactttgggaggcygaggcgggtggatcacttgaggtcaggagttcaagaccaccctggccaacatgatgaaaccccatctccactaaaaatataaaaattagccaggcatggtggaatgaacctgtaatcccagctactctggaggctgaggcaggagaatcgattgaacctgggaggcagaggttgcggtaagccaagatcacaccactgcactccggactccagtctgggcaacagagtgagactccatctcaaaaaaaaaaaaaaaaaaaaaaaaaaaaattacacacacacacagacacacacacacacacacacacacatttagtatatttctctgtctcttctccgtgtaacttttttaatgtggttgagctcagactgcatacgcaatttgtcctgttgctgcttttactcagtgttatgtgataagcatttcccatgttgttgtaaactctttagaagcatccttttaacgactgatgcagctttttataggtgaatcatctagtactttaaaagtgagaacttactctcagaagcacattaattttccctgtgagggataaggcaggctcagagtaagagaaaagagtcctatcacctaccaggtatgtgaccttggaggagtcaccttaaatggccaatcctcattttttaaactgagactaaggataacaacaggaaacgagctgcttcctatgattaatgtgaggctaagccaagatgacatgtattcaagcatttyaaaaaatatatacactaaagcaaatgtttgctctggattacacgtttttattttactttttgaaaactgaattttttcagaatgcagaagtgggcacaaatttaatcaaagtggyatctacaacagccacggccctgaargaagaagatggccaagtctactgccagccggaatttctttatgaaggtaaaatgcatcctcttgtcctgagtttaggaaaggggcagattttcacagggagcccagaggcctctttacataataattccctcctgtgcatggacaagggccaaaaaggaaagggtcttgggatgccctggtgaaaagcatctggggacatttctcttttctctatcttcaaatgcttcctaggaaggcaatgggtgaggccaggcacggtggctcccacctgtagtctcagcactttgggaagctgagggaggcagatcacttgaggccaggagttcaagaccagcctgagcaacatggcgaaaccccatctctactaaaaatacaaaaattagccgggtgtggtggcgcatgcctgtggtcccagctactcaggaggctgaggcatgagaatcacttgagcccaggaggtggagattgcagtgagttgagattgtgctaytgtactccagcctgggcaacagagcaagacactgtctcacaaaaataaaaataaaaataggaaggcagtgggtggttgttgggccagatgacttctgcaaatgctgtcccttactgaacatgggcttactgaacaggcacaatacatttccatttcttcctctcaacatccacaatatcctgcaaaaataggtgttatcggccccgtaatatagcgaagaaaactaggcctgggagtccttgaggtacacacagaaagcagaccctctagaacaggagtcacacccgtggagcagggctcctcaatctgggcaccatcgccatctggggctgggtcattctttgcagtgggtgctgtccagggaattgtaagatgtttagccacatccctggcctctacccactggaagccaggaagacccccatcctgaattggagcagccaaatatgtctccagacattgccagcatctcatgggagcaccattgccaygatggagaacttctgccccagaatataagcccgtgaggcgagaattgtgttgctgtgctcacagcgtatcagcagcacatgacacaaaggctggcatagagaggtctgtgttccatacgccaaagtgcagaatgaatggacttgtccaaggagactcagctagagagtgggacagagtgcatttcaactgagcgcattggctgggcacggtggctcacgcctgtaatcccagcactttgggatgctgaggtgggcagatcacttgaggccaggagtttgagaccagcctggccaacatggcgaaaacacatctctaccgaaaatacaaaaattagccggcatggtggtgcacgcttgtaatccataatcccagctactcaggaggttgtggcaggagaattgcttgaaccccgaaggcagagcagagagctgagattgcgccactgcactccagcctgggcaacagagactttgcctcaaaacaaaaaacaaaaaacaaaaacaaaaacaaaaaaccctgagagccttgttccatcagctgccccatgccaggaggtttgggcatctggaagagcacatagacttggggactcttttaggatgacccttggatttgacctaagaatccacttctgtaaaaggcatcccatgcatcccataaccggttctgtgatgcaactcattcccctggagtctttagaaatgaatcaatagatgatgccaggtctgaaggcatcaacccccaacccccatccctgctgacccaccacatcccttttttttttttcctgagaagaccacgcttgtttattgttgcaatattgtccacactaaaaagtgtaacaataaagaaaccacccgtaatccctgcccccgtgacagcgctttrggctacccatccaatcctcccatcatgcatggattgtgtgacataggccgggtcccttctggcgagttctcagactctctcatttcatcccggcagtgtcattcttttattgttgacattagatttgttcacgtacatcargggcttagtgtggggtctggcctatagggagagtccagccattggcagcaatattagaacagtcctaagaagcaggctcagacaatctcaaaacttgccaaaaggcaggcagcagagccaggttctgaccccagcagtctcttatcccagagcccattgcctctgcatttgtacttttgcaaaatgcattccatatcatctagaatgttccgaagctgcctcttgcacttaatgtatgtaacctgagtattttcccacatcctgaagattcttcaagaacatggctgttaaggaccgggcatggtgattcacacctataatcccagcactttgggaggccaagccttaatttcatgtaactactggccaggcgcaatggcaattacaggcattactcatgcctgtaatcccagcactttgggaagctgagacaggtggggcatctgaggtcaagagtttgagaccagcctggacaacatggcaaaaccccatctctatttaaaaaaaaaaatacaaaaattagccgggggtagtggtgcacacctgtagtcccagctacttgggaggcttaggcaggagaatcgctggtctgagaggggcccaggaacatcttggaagtctcaggcctactttgaggtcaagggcaggcaccttcttcttatctaagtatgggagtgttccctctgcctcaccttcatctgggcctgtcccttggaagtttcatgctttctcatttgtgggattggacatctgcttcccatctcaatacttcattccccttcccgccccactgagcctaatcagcatttatccatggatgtatctctgcttcctcttttcttggacattatatcttcaccagcagttggcggcaaccacctagaatatttcctaagagttgaacatccatttcagtattcagacttagaaattcaatttgatgcaataggcatatatacatatatacacatttacggccaagcaccggtggctcacacctgtaatcccagcactttgggaagctgagacgggcggatcatgaggtcaggagatcgagaccatcctggctaacatggtgaaaccctgtctctactgaaaatacaaaaaaaaaaaaaagtagccggatgtggtggcacgcaccctgtagtcctagctacttgggaggctgaagcaggagaattgcttgaacctgggaggcggtggttgcagtgagttgagattgagccactgcactccagcccaggcgacagagctagactccatctcaaaacaacaacaacaaacaaacctatatatatatatatttttatatatttatatatttatatatacacacacatttacagagaaaaaataatatttttgattatgtaaaaataataagcatgatgaaaatttcacataatgagaaacttagattctatcatagaaaatgtaaactgtaaggcagttagaaccccagcaatgcttccaaattttttctcttcatttgtaacctagcggagatacaataattctataaccagcattttacacttaaccttatggtatggacacttgcccatgttattaaaatcacttgtaaatgttgtttttccataatgttatcgcggaattcaccagatttaattaactgttctccattgacacccttttccacagcttcccattctgttttattttttagtttttattttagagatggggttcttgccatgttgagcaggttggtctcaaactcctggcctcaagcgatcctcccatctcagcttcccaaagtgctgggattacaggcatgagccaccatgcctagcacagcttcctatttcttttctttttgttttgttttgttttcttttcttttcttttcttttttttttttttcgagacagagtctcactctgtggcccaggctggagtgaagtggcacgatctcggctcactgcaacctctgcctcctgggttcaagtgattctcctgcctcagcctcctgagtagctggaattacaggcatgcggcaccatgcctggctaattttctttgtatttttagtagagggagggttttgccatgttggccaggctggtctcaaactcccgaactcaagtgatctgcccgcctcggcctcccaaagtgctgagattacaggcatgagccactgcgcccagccagcttcccatttctcatcacatatgtgcacatgcacgcacacatatatacacatcagcacttttttgaaaaaaagctttaagaaattgcagtagcctctgattttaatcatgcaattctctttgatttctatgttggrtaattaaagatgtttatacacttaaaacctaggtctggagtaccttgctcctggactctctaatagagctggggtaattaaattaccagaggctccctcccctgcctttgaccacctttgatccaatgcaggctctaaatcaagctcaaggatcttggtgtggaaacggattctgaggaaaggctacccaatctgacaggaagggtggatgctcccagcccccaatgataggggcttcatccacctcctcatttccttgtaggcttagagcttccacgggtcaattatgctcacaatggaaagcaataccgatatgtctttgctacaggagttcagtggagtccaatcccaaccaaggtacyggtctctgtgtattcacaagcctttcctacagtgattgtgtctatatgcaaagctgaattctaaggttctgagacgttgattagaaaagaggargtcagaaggagtaagcctaggataaaataaatttgaagtaaggatgttcagctgggagagggagtggtacctaatgggctaaggttcaggtaagaggttrtggctggagtttattcactgatttctttattcaatacatatttaatgagcaccaattatgggctacaatgtggtaggcactgagggtaaggaagtcagcagggagattcccaatccctgacctaaggaactcaccctctccagcagagagggtgtagctgaaacttagaggatttattttgcttctttttttgttttgttttgttttttcctttttattwaaaaaaaaaatacagaaagagacagagtctcattgtgttgtccatgcctgtcttgaattcctaggttcaggggatcctcctgcctcagccaccaaaagtgctggattacagcctcgagccaccatgcctggcccattttgcttcttaagctaccatttgtcaaacacttactgtgttctgggcactgtgctaagtgctgtgcaggtgtcacttctttttaatgtcttcatttttcataataaaatggaaaatcttttttttaaaatgcaaacagagcaggaatgtacacagccaaaaattaagcctccacccctccataccccaagccactctccactaatcccaaaccccagagggaaataggcctattgggagattaagagagattcagggaattgcacccttaaagcaacaaaggggttgtattgtactttaaatgtttgcattgaatatattcatttatttaactcatataaaattgcagtgcaatttcaaatacaagatatgttcgatatttttaggcagggtgtggtggctcacgcctgtaatcctagcactttgggaggctgaggattgcttgagaccaggagttcgagaccagcttggtcaacaatagcaagaccctgtctctatattaaaaaataataataaattttaaaagattttaatttttaaaagaattccttctacagtatcagctacgtggtggccagaggacccatgtttaaaactgggggaggaggccgggcgcggtggctcacacctgtaatcccagcattctgggaggctgaggtgggcggatcacctgaggtcaggagttcaagaccaacctggctatggtgaaaccccgtctstactaaaaatacaaaaaatcagccaggtgtggtggcacacgcctgtaattccagctactcaggaggctgaggcaggagaatcacttgaacccgggaggccgaggttgcagtgagccaagatcacgccattgcactccagcctgggcaacagcctggaaactccgtctcaaaaaacaaacaaacaaacaaaaaactgggggaggagagttagctcctgtcctttcttggctgtgctcaccagaggtagctgtcattgggagactacgtcaaaagtctacatccgatgggcttcatctcctctgtgtggatcttcatgcgctcctatttgcagagaatagtattctctcaaacaagtcatttatgtgtttttcctcrttggatgtacagataataaaatatgacattctcacaaagtcatccttaaaatggagagaggacgactgctggccagcggaacccctgtttgtgcccgcgccaggtgccaaggatgaggatgacggtaagactctaagaagccacgcctagttgctgcacgttactgcagatcgccctccaacagagacaccatctgggggcagctgacccccccaggtcataaagggggtggattggtgctttgaagtgtacatctgtctgggtcaaagctaaagggtgagggagtccccaagaccacctttacttctgataccaattgcaaagtttgagggtccccaagatagccttcagcttcaataattcattaaatcaccaacctcactgcaagtgcttatgttcacagttctggtktgtggcaatgaaaagawacagactaaaattagcacagggaagagatgcacaagacagagcccagcagggaccaggcaggagcttccaggtgcctctccaagtagagtcacagatagcactgacttctcccgacaatgacgtatgacaatactcaccgagtattactgccagccaggaagctcccctgagactcagtatggagagtttttattgggactcagtcatgtaaacatggttgactgcctgtgtgtctgacctttatttagtcttcagtcctcctggagatcaagttcataccacacggcacaaggccccaccataaatcccactgtaagggtagactgcctgatgtggcccaaggcccccaggtatacaaagatacttgtatcaagcaggacattcgacgggtatagaggtgacctcccagaagctgaggacaaaagccagccccctctttagacaagtttaagttttttaccgcacaaagtccatctcctttccactcagtgayattaaactctctcagaatgcagaatcttggttttaaaattgattgcagtggctggatcccaaacaaatgtttttaagaaatggagtcttgctctgttgcccaggctggagtgtagtggcatgatcatagctcactgcagcctcaaactcctgggctcaagtgatcctcctgcctcagcccaccaagtagctggagctacaggggcacaccaccatgcctagctcattctttttatttttttgtaaagaaagggtctcactatgtttcccaggctggtctcaaactcttgggctcaagcgatcctcccatcttggcctcccaaagtgctgggattacaggtgtgagccagtgcacctggcctggatcccggatccaaatttttaacaatgtataagcatgtaaatgtttcacagagccgctggaaatgtgtatttgtggcccacctctattttctaggtttccacttgactgaatgatgctttccctcttccattctcagaaatgcttcagaaatgccctgcccacagccctgaggaggctaaggagggtaactagaaccataggtggggatgccacctggccacaccagcaatggggctgccacacctgcaaggagggcaggctgccccacttgagcctgccagcttcttccctcaggtcacaagggagtggttttccacctgggccttgtcttcctactgatcatggcatggcacgccaggccagcaaccctgtgtcactgtcatctccaaggcgggggaccacaggccttgcctcctgttcaggtcgttctcccactcagtgggacacttcctttacattctctgtgaggagggagtatcgttgtcttcattttaccaaygggatgctcagagagtgacctttttgcccaaggtcacacaccccttacattcagaggtaagatttaaatccaggccaatctgacctcaacgatgctcaactgctcttccacctgggaccctctggaggcattgagagtatttgcaggaagttgatatgcattatttcatttaactctctatcccttcagagtgagtattgagagtatttccattttacagaggggaaggatgagtttagtagcactgctacatgtgcaagagatgaattgggcccattgaaatgccattcttcaagccaggtgcggtggttcatgcctgtaatcccagcacttgggaggtcaaggtaggcagatcgcttgagcccaggagtccaagaccagcatgggcgatatagggagaccccatctgacaaaaaatacaaaaattagccagacgtggtgtcatgtgcctgtagtcccagctacttggagggctgaagtgggaggatagcttgagcccaagagatcgagattgcagtgagctgtgatcacaccactgcactctagcctgggcaacagagtaagaccctgtctcaaaaaagcaaaacaaacaaacaaaaaaccgaataccactcttcgatgcctgcaataatttacagagtgctttcaaaatccatcattcaggagatactctcggcaaccctgtggagtgtaggtgagattatcgcatctctacagatgaagagactgaggctccgagaggtcaagggactggcccagccaagggtagaaccaggttttctggtttgttcattcgtttgtttgttcgtttgttttgaggccgtgtttcactccgtcacccaggctggaatgcaatggcacgatctcggctcaccgcaacctccactcccaggttcaagtaattctctggcttcagtctactgagtagctgagattacaagcacccaccaccacacccagctaatttttgtatttttagtagagatggggtttcaccacgttggccagactggtctcaaactcctgatctgaagtgatccgcccacctctgctcccaaagtggcgggattacaggcgtgagccaccgcgcccggcctagaaccaggttttctgatgcctagttgccaggcctttcccttctgttacagtgtctcaaattcactccctcctgttttggttagatacatatgtttaaagagggcagagagacatgctgagaaattcatccctccgactgaagcctgcacttttacgaagtgttttttttctgtttccctaaaggagtaatcttatcagccattgtctctactgatccccaaaagctgccttttctgctcattctggatgccaaaagctttacggaattggcccgtgcctctgttgatgtcgatatgcacatggatctccatggattattcattacagacatggactgggacacaaaaaagcaggccgcttctgaggaacagcgggacagggcttccgactgccacggggctcctctgacctgatggtgttggggtttgggtaggggaggggagctcggctgtcagaactccatggatatgtttctttggatggaggggagggcctttgttaccttttgcacttattctttctgtgggtgctttgacaagggcatggcaagagagmttgtcagtatcatttctttcattttattttggctgtaaaaattttgtttgaaagtcaaacatttgaacatcaaatatgtattgattagatccagtccttctaagaaacctcctttcctttaacaaaaagaccttgaccatgaatcagagattgtattcaatgacattatcatcatttttagaacgagccactaacctattagagaagaggcagataattatttatcattgtgccttcctctgtctctttctctttcctttgctccctcccatgtttctggtggactaaattgtgtatctgggagttctcactttctagccaggcctgatgagttaagttacatgaccaggaaggttatgccactttgtggtcattccatgcaagtcatggcgtaatataaaataataaaaactttaaagtctgctcagactttatttttacatggcttctccctctgaaggtcttctaaggcaataaaatagttgcagagcttgatggttcacagccagcacgatgcttcattgtacaatcgacgggactaacagattgctgtgggactcctctttgcaagaggggattaataggtactggacattgacctggctagccacggccgaggggctcaaacccaggattgagtcccagggcctgggctggcatgaggagttcttccctgctgctgagaactagagcagtgggctgtgcccatgtgcgtagataaaaggagtttctccaagcttgtacgtgctgccgagataaaccaggcattttgggcagcgtggaaggaggttgaaggcccctgagccaggtagtgatggggatggagaaagttgggaacaaggcaaatgggatgctacaccactaccaggagccccataggcatctgagtctacagtcaagtgggtgcctgatgcatggtttaaagaaacaaaggcaggctggataattcccaggtcatgggatcgggggagctgggtttcacagccttattctgcacttacttcctctcctgaatctggatttcattcagtcaccaatggggattccatgacgtgtctggaggatgggaaggactctctagtggcaccgcatggaatcccccagaggggcagctccctccaggatggtcttagcttttgccctgcacccaccatgaagccatacttagcctctaccaaaatgtaggctccatgaggccagggagttaggttttttttcttttctttctctttgacagggtcttgctctgtcaccccagctagaatgcagtggtgcaatcttggctcactgcagcctcaacctcccaggcttaagcgaccctcccacctcagcctccggagtagtggggagtacagccatgcgccaccacacccagctaagttttgtattttttgtagagacagggtttcgtcatgttgcccaggctggtcacaaactcctgggctcaagtgatcctcccgccttggcctttcaaagtgctaggattacaggcacgacccaccttgcccagtctttttttttcttttcttttcttttcttttcttttttttttttttttgagacagagtctcactctgtcgcccaggctggagtacagaggtgcgatctcggctcactacaacctccgtctcccgggttcaagctattctcctgcttcagcctccccagtagctgggactacaaacacgtgccaccatgcctggcaatctttgtgctgttgttttcttttttgtttgttttttgtttttttaagtaaagatggggtttcaccatgttggccagcctggtcttgaactcctgaccttaggtgatctgccacctcagcctcccaaagtgccgggattacaggcgtgagccaccatgtccagccaagcctttttttttttcttagttgaagtttttattgagataattgtacgtgcacatgcagtgttgagaaattatacagaaagatctcatgcagactttacccagtttcccccccatttgtaacattttgcagaatgatatagtataatatcacaaccaggatattgatattatccaccaatcttatttagatttcccagttttacttgtactcatttgtgtgtatgtgtgtatagttctagacaaattctagactgcatccaccatcacaggcaagataccaaatagcacgtcagcacgaggatccctcatgtcactttttttatcaccaaacctacctcctgccctcctcacctccgatccctaacccttggcaaccaccataaaatggtgtcatttcaaaaatgttatgtaaatgggatgatgcggtattaaccttttgggattggcctttctcacacagcagaattccttgaagattcatccagtcatggtgggtattcattcaagtcattaggcattgggtgtgtctgactcactactttatcctcaacacttgtaacactgcctcgtgtaatgtaggcactcaatacatacttgttgaatgaacgaatgcaccagttctcccaacagattcaactggtcaatgcatcaacaagaaatggatgtcttactggagagctcctgggagatggggaagcgagtcccacatggagcccaatgacaacacacacaattccctgctaagtttcctcactcctgctacccctgatcaccccctctctcttctcctccctgttggtccctcaatacccctcctatcgttctcagcattttcatttttgccctaagcttacataccctgttcaacaaaaatgcaagccatggaaatggcaggacaaagaccatctgctcttcctcagaatcgtctttgggaacctcagtacctccagccttgataaaatggacgaagggggaccgggcgtggtggcccacctctgtaatcccagcactttgggaggccaaggcaggcagatcacgaggtcaggagctccagaccagtctggccaacatggtgaaacctcgtctctactaaaaatacaaaaattagccgggcttggtggtgggtgcctgtaatcccagctacttaggaggctgaggcaggagaatcacgtgaacccagggggcggaggttgcagtgagctgagatcgcgccactgcactccagcctgggtgacagagtgagactctgtctcaaaacaaaacaaaataaaataaagcagaatagacaaaagggaaatgccaactctagtggcctgaaaaaagcacgattaagggctgcgtttgggtggcaggaatggaaaagaattgaaaaatgtgacaggccctcaaccactcattcttctactttaaatatttgagaagagggtagaattaaaaaatgcttccccacctccattctactagattcctattgcctaacagtacccagaactagtcatgaaaaagggtgcagttctgcggggaagaaaaatatgtccgtggtttgtttatcttgttgaagatgacaggtagaataccagactgatgagggaggctggcacaccaaatctttctttctcagtttcaaaaacaccaaaagttgatgccaagatattcaatttatctgggtccttaattctgacacatttcatacataagccagggtaattagctcaaaactccacaagagctatgatgcgtgctccgttcttgaaggacccaagagacgctccatcttaccctctgagccttccttgttatgtttcatgtgggtggaatatatgaccaggaagttctgcaggatttgtttattgctttgataaagccacagcatttctcaagtgctctatgctgcaagcgtcaggaacacgctaggaaacccaaatgtttgctgacccactaactttttccaccaaagctttctctaatttaatcccaattcaggaataagctggatagacacttgggcaatcaactcacgaaaaatctaagtgtgttggcgtgacatctacaatatttgcacaaacacttcctcctgaccaaagttcagcctgactcctttaagaaggttgctggtccaggttaagtataaacacctttgatggcttcttaaaaactgtttaaagactgtttgggtggtttttaaatggccaggagatgtctttctcatgacaaatcagtacatgcagaccaaaaagtcatcaccaccgttctcaacatccaacagtgatgagatgtatggcctcaacacttgaacttcttcctgggagtttagactcagagaccctgcacagaaaaacacagcgccaactgccccagctcctgtgccacatcaaaaagcatcctttgaggtccagccccagctaagaggcagattttcttggacacaaccagcaaacagagatgtggcggcactgtattcagccagggtggggaagagaacagtttctttctcataactaagaaaggctttcccaaggccaggcgcagtggctcatgcctgtaatcccagcactttgggaggccgcggtgggaggatcacttgaggtcaggagatggagaacatcctggctaacacggtgaaacccagtctccactaaaaatacaaaaaattagccgggcttggtggcgggcacctgtaatcccagctacttgggaggctgaggcaggagaatggcgtgaacctgggaggcggagcctgcagtgagctgagatcgtgccactgcactccaggctgggcgacagagtgagacaacgtctcaaaccaaaaaaaaaaaaaaaaaaaaaaaaaagaaaagaaaaagaaaggcttcctggagggctgggacttgaggacctgcctcagtggccagagggaactggcaaagggctggtcctgccaggttgggagtgcagggccaggatttggagacagatgtggttgcctgaacaaagcaggtgcagagggaatttcccaagaaagagcagtggacagagtcaggcttagggctttttgttatttgctttttgttttttttcctgtgttaaatcttatctgttcattgtagaacacgtggataagttaaagaaataaatgagaaagataccacagttacattaccaaaaggaaaccactgaaatcattttgatatgtttttctccaggtgtttttgagtgcgtgtgtgtgggcagcgtttacatattagtgatcaccagtttataacctactctttttcacttaacatatgatgcaagcattttcccaggtcattaaattcttttaatgggtgcatattattccttcttgggggcatggtgtaatgtagactaccctactgttggacatttaggttatttccaatttttggctattatasataaggccctgataagtaacgtcctgcataaaattctagagttcatcccctaccctgtatttgggtggctgttactgttattatcttcagctagattccccactgaaaatttctgagccaaagagtaggaaaacaaggtaatgggtgttttcttgaaaggccaaaggtttggcttgattcataagactgaaaccaagaagacaatcttggatatttgaggctcaaatggtcaaaatggtgatagggctgagaaaacacatttgtgaggaaactgaaaaaacatgggtatatggtaatatcattttagttcaaattctcccttcttccttttccctagtctttccacttctccatattcttccactccatacaaatgcatggtttttgtttggttggttggtttttgagacggagtctcgctttgtcacccaggctggagtgcagtggcacgatctcagctcactgcaacctctgcctcctgggtttaagcgattctcctgcctcagcctcccaagtagctggtactacaggcatgcgccaccacacccggctaatttttttgtattttcagtagagacggagtttcaccatgttggccaggctggtcccgaactcctgacctcaggtgatccacctgcctcggcctcccaaagtcctgggattacaggcgtgagccaccgtgcctggccacaaatacatattctttttcaggcatacattcacacattcattcactcattcagtgataatcaagactgtgcttgcatatagtgctggaaaaaaccagtgcttcactgtcctcagggagtatatggctttgtgaaaagccaacacaatacaatggaatggaggtgaaaagtgggcgtaccctctgcaaccttagccagggacggccgcaaggggaaggatggtagcagttggcaaggtgaacaggtgatccagatttaaaaaggggcgtgtgcctggccctggagtcagggaagcatatgggaatctggaaaacctgaactgctgggcagaaggcgggggccacagcaaaagacagcttcaagcagacccccactttatctgcactcaggtcagaaatgaaactggcattaactaaagagaattctccaaaggtagcttcaaggacaatcaaggactgacattcat
